United States Patent Application Publication US 2026/0337637 A1, published October 29, 2026 (application 19/485,005).

The application's sequence listing, which the Patent Office published only in electronic form, follows.

SEQUENCE LISTING (957 sequences)

SEQ ID NO: 1 - RNA, 81 nt, synthetic construct
  source 1..81: mol_type = other RNA
ggaaatcgcaaaatttgctcttcgcgttagatttcttttagttttctcgcaactagcaagctttttgttctcgccgccgcc

SEQ ID NO: 2 - RNA, 81 nt, synthetic construct
  source 1..81: mol_type = other RNA
ggaaatcgcaaaattttcttttcgcgttagatttcttttagttttctttcaactagcaagctttttgttctcgccgccgcc

SEQ ID NO: 3 - RNA, 83 nt, synthetic construct
  source 1..83: mol_type = other RNA
ggaaatcgcaaaatttttgctctttttcgcgttagatttcttttagttttctykcaactagcaagctttttgttctcgccrcc

SEQ ID NO: 4 - RNA, 203 nt, synthetic construct
  source 1..203: mol_type = other RNA
ggaaatccccacaaccgcctcatatccaggctcaagaatagagctcagtgttttgttgtttaatcattccgacgtgttttgcgatattcgcgcaaagcagccagtcgcgcgcttgcttttaagtagagttgtttttccacccgtttgccaggcatctttaatttaacatatttttatttttcaggctaacctacgccgccacc

SEQ ID NO: 5 - RNA, 76 nt, synthetic construct
  source 1..76: mol_type = other RNA
ggaaataagagagaaaagaagagtaagaagaaatataagatctccctgagcttcagggagccccggcgccgccacc

SEQ ID NO: 6 - RNA, 89 nt, synthetic construct
  source 1..89: mol_type = other RNA
ggaaaccccccacccccgtaagagagaaaagaagagtaagaagaaatataagatctccctgagcttcagggagccccggcgccgccacc

SEQ ID NO: 7 - RNA, 59 nt, synthetic construct
  source 1..59: mol_type = other RNA
ggagaacttccgcttccgttggcgcaagcgctttcattttttctgctaccgtgactaag

SEQ ID NO: 8 - RNA, 46 nt, synthetic construct
  source 1..46: mol_type = other RNA
ggaaataagagagaaaagaagagtaagaagaaatataagagccacc

SEQ ID NO: 9 - RNA, 56 nt, synthetic construct
  source 1..56: mol_type = other RNA
ggaaataagagagaaaagaagagtaagaagaaatataagaccccggcgccgccacc

SEQ ID NO: 10 - RNA, 79 nt, synthetic construct
  source 1..79: mol_type = other RNA
ggaaactttatttagtgttactttattttctgtttatttgtgtttcttcagtgggtttgttctaatttccttggccgcc

SEQ ID NO: 11 - RNA, 79 nt, synthetic construct
  source 1..79: mol_type = other RNA
ggaaaatctgtattaggttggcgtgttctttggtcggttgttagtattgttgttgattcgtttgtggtcggttgccgcc

SEQ ID NO: 12 - RNA, 79 nt, synthetic construct
  source 1..79: mol_type = other RNA
ggaaaattattaacatcttggtattctcgataaccattcgttggattttattgtattcgtagtttgggttcctgccgcc

SEQ ID NO: 13 - RNA, 79 nt, synthetic construct
  source 1..79: mol_type = other RNA
ggaaattattattatttctagctacaatttatcattgtattattttagctattcatcattatttacttggtgatcaaca

SEQ ID NO: 14 - RNA, 79 nt, synthetic construct
  source 1..79: mol_type = other RNA
ggaaataggttgttaaccaagttcaagcctaataagcttggattctggtgacttgcttcaccgttggcgggcaccgatc

SEQ ID NO: 15 - RNA, 74 nt, synthetic construct
  source 1..74: mol_type = other RNA
ggaaatcgtagagagtcgtacttagtacatatcgactatcggtggacaccatcaagattataaaccaggccaga

SEQ ID NO: 16 - RNA, 79 nt, synthetic construct
  source 1..79: mol_type = other RNA
ggaaacccgcccaagcgaccccaacatatcagcagttgcccaatcccaactcccaacacaatccccaagcaacgccgcc

SEQ ID NO: 17 - RNA, 79 nt, synthetic construct
  source 1..79: mol_type = other RNA
ggaaagcgattgaaggcgtcttttcaactactcgattaaggttgggtatcgtcgtgggacttggaaatttgttgtttcc

SEQ ID NO: 18 - RNA, 79 nt, synthetic construct
  source 1..79: mol_type = other RNA
ggaaactaatcgaaataaaagagccccgtactcttttatttctattaggttaggagccttagcatttgtatcttaggta

SEQ ID NO: 19 - RNA, 79 nt, synthetic construct
  source 1..79: mol_type = other RNA
ggaaatgtgatttccagcaacttcttttgaatatattgaattcctaattcaaagcgaacaaatctacaagccatatacc

SEQ ID NO: 20 - RNA, 74 nt, synthetic construct
  source 1..74: mol_type = other RNA
ggaaatcgtagagagtcgtacttacgtggtcgccattgcatagcgcgcgaaagcaacaggaacaagaacgcgcc

SEQ ID NO: 21 - RNA, 74 nt, synthetic construct
  source 1..74: mol_type = other RNA
ggaaatcgtagagagtcgtacttagaataaacagagtcgggtcgacttgtctctgatactacgacgtcacaatc

SEQ ID NO: 22 - RNA, 79 nt, synthetic construct
  source 1..79: mol_type = other RNA
ggaaaatttgccttcggagttgcgtatcctgaactgcccagcctcctgatatacaactgttccgcttattcgggccgcc

SEQ ID NO: 23 - RNA, 79 nt, synthetic construct
  source 1..79: mol_type = other RNA
ggaaatctgagcaggaatcctttgtgcattgaagactttagattcctctctgcggtagacgtgcacttataagtatttg

SEQ ID NO: 24 - RNA, 79 nt, synthetic construct
  source 1..79: mol_type = other RNA
ggaaagcgattgaaggcgtcttttcaactactcgattaaggttgggtatcgtcgtgggacttggaaatttgttgccacc

SEQ ID NO: 25 - RNA, 79 nt, synthetic construct
  source 1..79: mol_type = other RNA
ggaaaattttagcctggaacgttagataactgtcctgttgtctttatatacttggtccccaagtagtttgtcttccaaa

SEQ ID NO: 26 - RNA, 104 nt, synthetic construct
  source 1..104: mol_type = other RNA
ggaaatttttttttgatattataagagtttttttttgatattaagaaaatttttttttgatattagaagagtaagaagaaatataagaccccggcgccgccacc

SEQ ID NO: 27 - RNA, 57 nt, synthetic construct
  source 1..57: mol_type = other RNA
ggaaataagagagaaaagaagagtaagaagaaatataagagccaaaaaaaaaaaacc

SEQ ID NO: 28 - RNA, 76 nt, synthetic construct
  source 1..76: mol_type = other RNA
ggaaatctccctgagcttcagggagtaagagagaaaagaagagtaagaagaaatataagaccccggcgccgccacc

SEQ ID NO: 29 - RNA, 11 nt, synthetic construct
  source 1..11: mol_type = other RNA
gggatcctacc

SEQ ID NO: 30 - RNA, 47 nt, synthetic construct
  source 1..47: mol_type = other RNA
gggaaataagagagaaaagaagagtaagaagaaatataagagccacc

SEQ ID NO: 31 - RNA, 15 nt, synthetic construct
  source 1..15: mol_type = other RNA
taaagctccccgggg

SEQ ID NO: 32 - RNA, 15 nt, synthetic construct
  source 1..15: mol_type = other RNA
taagcccctccgggg

SEQ ID NO: 33 - protein, 32 aa, synthetic construct
LEPGEKPYKCPECGKSFSQSGALTRHQRTHTR

SEQ ID NO: 34 - DNA, 48 bp, synthetic construct
  source 1..48: mol_type = other DNA
tcgggatctgagacgcctgggacctcggaatcggctacgcccgaaagt

SEQ ID NO: 35 - protein, 64 aa, synthetic construct
LEPGEKPYKCPECGKSFSQSGALTRHQRTHTRLEPGEKPYKCPECGKSFSQSGALTRHQRTHTR

SEQ ID NO: 36 - protein, 96 aa, synthetic construct
LEPGEKPYKCPECGKSFSQSGALTRHQRTHTRLEPGEKPYKCPECGKSFSQSGALTRHQRTHTRLEPGEKPYKCPECGKSFSQSGALTRHQRTHTR

SEQ ID NO: 37 - protein, 20 aa, synthetic construct
PKKKRKVEASSPKKRKVEAS

SEQ ID NO: 38 - protein, 16 aa, synthetic construct
KRPAATKKAGQAKKKK

SEQ ID NO: 39 - protein, 11 aa, synthetic construct
RQRRNELKRSP

SEQ ID NO: 40 - protein, 38 aa, synthetic construct
NQSSNFGPMKGGNFGGRSSGPYGGGGQYFAKPRNQGGY

SEQ ID NO: 41 - protein, 42 aa, synthetic construct
RMRIZFKNKGKDTAELRRRRVEVSVELRKAKKDEQILKRRNV

SEQ ID NO: 42 - protein, 12 aa, synthetic construct
SALIKKKKKMAP

SEQ ID NO: 43 - protein, 10 aa, synthetic construct
RKLKKKIKKL

SEQ ID NO: 44 - protein, 10 aa, synthetic construct
REKKKFLKRR

SEQ ID NO: 45 - protein, 20 aa, synthetic construct
KRKGDEVDGVDEVAKKKSKK

SEQ ID NO: 46 - protein, 17 aa, synthetic construct
RKCLQAGMNLEARKTKK

SEQ ID NO: 47 - RNA, 1298 nt, synthetic construct
  source 1..1298: mol_type = other RNA
gggaaataagagagaaaagaagagtaagaagaaatataagaccccggcgccgccaccatgcctaagaagaagcgcaaggtgtctaacctcctgactgtgcaccagaacttgccagccttgccggtggacgcaacttccgacgaagtccggaagaacctcatggacatgttccgggacagacaggcgttttcagagcacacctggaaaatgctgctgtccgtctgccggtcctgggccgcctggtgcaagctgaacaacaggaagtggttccccgctgaaccggaggacgtgcgcgattaccttctgtaccttcaagcccggggactcgcagtcaagaccatccagcaacacctgggccagctgaacatgctgcatcggcggtccggactgcctagacctagcgattccaatgccgtgtcactcgtgatgcggcggatccggaaggaaaacgtggacgccggggaaagggccaagcaggcacttgccttcgaaaggaccgacttcgaccaagtccgctcgctgatggaaaattcggaccggtgtcaggatattaggaacctcgcgttcctggggattgcgtacaataccctgctgagaatcgccgagattgcccgcatccgcgtgaaggacatttcgagaaccgacggaggccggatgctgatccacattggtcgcaccaagactctggtgtccactgccggggtggagaaggccctgtcgctgggcgtgaccaaactggtggagcgctggatttccgtgagcggagtggcggatgacccgaacaactacctgttctgccgcgtgcgaaagaacggagtggccgctccctccgcaacgagccagctcagcaccagagccttggagggcatcttcgaagccacacaccgcctcatctatggtgccaaggacgatagcggccagagatacctcgcgtggtccggacattccgcccgcgtgggcgcggctcgggacatggccagggctggagtctccatccccgaaatcatgcaggccgggggatggaccaacgtgaacatcgtgatgaactacatccggaacctggattcagagactggtgccatggtccgcctgctggaggacggcgattaataatgaattaatagtgtagtgactagtgactgactaggatctggttaccactaaaccagcctcaagaacacccgaatggagtctctaagctacataataccaacttacacttacaaaatgttgtcccccaaaatgtagccattcgtatctgctcctaataaaaagaaagtttcttcacatgcggccgc

SEQ ID NO: 48 - RNA, 754 nt, synthetic construct
  source 1..754: mol_type = other RNA
gggaaataagagagaaaagaagagtaagaagaaatataagaccccggcgccgccaccatgggagtgaaggtgctgttcgctctcatctgcattgctgtggctgaggcccaggtgcagctgcaagagtctggcggcggactggtgcaacctggcggcagcttgagactgagctgtgctgccagcggcttcacgctggattactactacatcgggtggtttagacaggcccccggcaaggagagggaagccgtctcctgcattagcggctcatccgggagcacctactacccggatagcgtcaagggcagattcaccatctcccgggacaacgccaagaacacggtgtacctgcagatgaacagcctgaagcccgaggacacggctgtgtactactgcgctaccatcaggagcagcagctggggcggctgcgtccattacggaatggactactggggcaaaggcacccaggtgaccgtgtccagcggcaccaccagactgctgtctggacacacctgtttcacactgacagggctgctgggcaccctggtgaccatggggctgcttacataatgaattaatagtgtagtgactagtgactgactaggatctggttaccactaaaccagcctcaagaacacccgaatggagtctctaagctacataataccaacttacacttacaaaatgttgtcccccaaaatgtagccattcgtatctgctcctaataaaaagaaagtttcttcacatgcggccg

SEQ ID NO: 49 - RNA, 100 nt, synthetic construct
  source 1..100: mol_type = other RNA
  modified_base 1: mod_base = OTHER; note = 2'-O-methyl modified nucleotide with phosphorothioate linkage
  modified_base 2: mod_base = OTHER; note = 2'-O-methyl modified nucleotide with phosphorothioate linkage
  modified_base 3: mod_base = OTHER; note = 2'-O-methyl modified nucleotide with phosphorothioate linkage
  modified_base 29: mod_base = OTHER; note = 2'-O-methyl modified nucleotide
  modified_base 30: mod_base = OTHER; note = 2'-O-methyl modified nucleotide
  modified_base 31: mod_base = OTHER; note = 2'-O-methyl modified nucleotide
  modified_base 32: mod_base = OTHER; note = 2'-O-methyl modified nucleotide
  modified_base 33: mod_base = OTHER; note = 2'-O-methyl modified nucleotide
  modified_base 34: mod_base = OTHER; note = 2'-O-methyl modified nucleotide
  modified_base 35: mod_base = OTHER; note = 2'-O-methyl modified nucleotide
  modified_base 36: mod_base = OTHER; note = 2'-O-methyl modified nucleotide
  modified_base 37: mod_base = OTHER; note = 2'-O-methyl modified nucleotide
  modified_base 38: mod_base = OTHER; note = 2'-O-methyl modified nucleotide
  modified_base 39: mod_base = OTHER; note = 2'-O-methyl modified nucleotide
  modified_base 40: mod_base = OTHER; note = 2'-O-methyl modified nucleotide
  modified_base 68: mod_base = OTHER; note = 2'-O-methyl modified nucleotide
  modified_base 69: mod_base = OTHER; note = 2'-O-methyl modified nucleotide
  modified_base 70: mod_base = OTHER; note = 2'-O-methyl modified nucleotide
  modified_base 71: mod_base = OTHER; note = 2'-O-methyl modified nucleotide
  modified_base 72: mod_base = OTHER; note = 2'-O-methyl modified nucleotide
  modified_base 73: mod_base = OTHER; note = 2'-O-methyl modified nucleotide
  modified_base 74: mod_base = OTHER; note = 2'-O-methyl modified nucleotide
  modified_base 75: mod_base = OTHER; note = 2'-O-methyl modified nucleotide
  modified_base 76: mod_base = OTHER; note = 2'-O-methyl modified nucleotide
  modified_base 77: mod_base = OTHER; note = 2'-O-methyl modified nucleotide
  modified_base 78: mod_base = OTHER; note = 2'-O-methyl modified nucleotide
  modified_base 79: mod_base = OTHER; note = 2'-O-methyl modified nucleotide
  modified_base 80: mod_base = OTHER; note = 2'-O-methyl modified nucleotide
  modified_base 81: mod_base = OTHER; note = 2'-O-methyl modified nucleotide
  modified_base 82: mod_base = OTHER; note = 2'-O-methyl modified nucleotide
  modified_base 83: mod_base = OTHER; note = 2'-O-methyl modified nucleotide
  modified_base 84: mod_base = OTHER; note = 2'-O-methyl modified nucleotide
  modified_base 85: mod_base = OTHER; note = 2'-O-methyl modified nucleotide
  modified_base 86: mod_base = OTHER; note = 2'-O-methyl modified nucleotide
  modified_base 87: mod_base = OTHER; note = 2'-O-methyl modified nucleotide
  modified_base 88: mod_base = OTHER; note = 2'-O-methyl modified nucleotide
  modified_base 89: mod_base = OTHER; note = 2'-O-methyl modified nucleotide
  modified_base 90: mod_base = OTHER; note = 2'-O-methyl modified nucleotide
  modified_base 91: mod_base = OTHER; note = 2'-O-methyl modified nucleotide
  modified_base 92: mod_base = OTHER; note = 2'-O-methyl modified nucleotide
  modified_base 93: mod_base = OTHER; note = 2'-O-methyl modified nucleotide
  modified_base 94: mod_base = OTHER; note = 2'-O-methyl modified nucleotide
  modified_base 95: mod_base = OTHER; note = 2'-O-methyl modified nucleotide
  modified_base 96: mod_base = OTHER; note = 2'-O-methyl modified nucleotide
  modified_base 97: mod_base = OTHER; note = 2'-O-methyl modified nucleotide with phosphorothioate linkage
  modified_base 98: mod_base = OTHER; note = 2'-O-methyl modified nucleotide with phosphorothioate linkage
  modified_base 99: mod_base = OTHER; note = 2'-O-methyl modified nucleotide with phosphorothioate linkage
  modified_base 100: mod_base = OTHER; note = 2'-O-methyl modified nucleotide
ctaacagttgcttttatcacgttttagagctagaaatagcaagttaaaataaggctagtccgttatcaacttgaaaaagtggcaccgagtcggtgctttt

SEQ ID NO: 50 - RNA, 404 nt, synthetic construct
  source 1..404: mol_type = other RNA
  modified_base 7: mod_base = OTHER; note = N1-methylpseudouridine
  modified_base 25: mod_base = OTHER; note = N1-methylpseudouridine
  modified_base 35: mod_base = OTHER; note = N1-methylpseudouridine
  modified_base 37: mod_base = OTHER; note = N1-methylpseudouridine
  modified_base 59: mod_base = OTHER; note = N1-methylpseudouridine
  modified_base 70: mod_base = OTHER; note = N1-methylpseudouridine
  modified_base 73: mod_base = OTHER; note = N1-methylpseudouridine
  modified_base 77: mod_base = OTHER; note = N1-methylpseudouridine
  modified_base 83: mod_base = OTHER; note = N1-methylpseudouridine
  modified_base 89: mod_base = OTHER; note = N1-methylpseudouridine
  modified_base 100: mod_base = OTHER; note = N1-methylpseudouridine
  modified_base 104: mod_base = OTHER; note = N1-methylpseudouridine
  modified_base 109: mod_base = OTHER; note = N1-methylpseudouridine
  modified_base 116: mod_base = OTHER; note = N1-methylpseudouridine
  modified_base 119: mod_base = OTHER; note = N1-methylpseudouridine
  modified_base 120: mod_base = OTHER; note = N1-methylpseudouridine
  modified_base 130: mod_base = OTHER; note = N1-methylpseudouridine
  modified_base 137: mod_base = OTHER; note = N1-methylpseudouridine
  modified_base 141: mod_base = OTHER; note = N1-methylpseudouridine
  modified_base 142: mod_base = OTHER; note = N1-methylpseudouridine
  modified_base 144: mod_base = OTHER; note = N1-methylpseudouridine
  modified_base 151: mod_base = OTHER; note = N1-methylpseudouridine
  modified_base 152: mod_base = OTHER; note = N1-methylpseudouridine
  modified_base 158: mod_base = OTHER; note = N1-methylpseudouridine
  modified_base 161: mod_base = OTHER; note = N1-methylpseudouridine
  modified_base 181: mod_base = OTHER; note = N1-methylpseudouridine
  modified_base 185: mod_base = OTHER; note = N1-methylpseudouridine
  modified_base 197: mod_base = OTHER; note = N1-methylpseudouridine
  modified_base 200: mod_base = OTHER; note = N1-methylpseudouridine
  modified_base 201: mod_base = OTHER; note = N1-methylpseudouridine
  modified_base 209: mod_base = OTHER; note = N1-methylpseudouridine
  modified_base 212: mod_base = OTHER; note = N1-methylpseudouridine
  modified_base 214: mod_base = OTHER; note = N1-methylpseudouridine
  modified_base 215: mod_base = OTHER; note = N1-methylpseudouridine
  modified_base 216: mod_base = OTHER; note = N1-methylpseudouridine
  modified_base 220: mod_base = OTHER; note = N1-methylpseudouridine
  modified_base 231: mod_base = OTHER; note = N1-methylpseudouridine
  modified_base 234: mod_base = OTHER; note = N1-methylpseudouridine
  modified_base 243: mod_base = OTHER; note = N1-methylpseudouridine
  modified_base 248: mod_base = OTHER; note = N1-methylpseudouridine
  modified_base 271: mod_base = OTHER; note = N1-methylpseudouridine
  modified_base 288: mod_base = OTHER; note = N1-methylpseudouridine
  modified_base 293: mod_base = OTHER; note = N1-methylpseudouridine
  modified_base 295: mod_base = OTHER; note = N1-methylpseudouridine
  modified_base 298: mod_base = OTHER; note = N1-methylpseudouridine
  modified_base 302: mod_base = OTHER; note = N1-methylpseudouridine
  modified_base 303: mod_base = OTHER; note = N1-methylpseudouridine
  modified_base 311: mod_base = OTHER; note = N1-methylpseudouridine
  modified_base 313: mod_base = OTHER; note = N1-methylpseudouridine
  modified_base 314: mod_base = OTHER; note = N1-methylpseudouridine
  modified_base 315: mod_base = OTHER; note = N1-methylpseudouridine
  modified_base 316: mod_base = OTHER; note = N1-methylpseudouridine
  modified_base 326: mod_base = OTHER; note = N1-methylpseudouridine
  modified_base 335: mod_base = OTHER; note = N1-methylpseudouridine
  modified_base 346: mod_base = OTHER; note = N1-methylpseudouridine
  modified_base 347: mod_base = OTHER; note = N1-methylpseudouridine
  modified_base 349: mod_base = OTHER; note = N1-methylpseudouridine
  modified_base 350: mod_base = OTHER; note = N1-methylpseudouridine
  modified_base 359: mod_base = OTHER; note = N1-methylpseudouridine
  modified_base 367: mod_base = OTHER; note = N1-methylpseudouridine
  modified_base 370: mod_base = OTHER; note = N1-methylpseudouridine
  modified_base 371: mod_base = OTHER; note = N1-methylpseudouridine
  modified_base 374: mod_base = OTHER; note = N1-methylpseudouridine
  modified_base 377: mod_base = OTHER; note = N1-methylpseudouridine
aggaaataagagagaaaagaagagtaagaagaaatataagaccccggcgccgccaccatggacaagaaatactccatcggactggacatcggaaccaactccgtgggatgggccgtgattacggacgagtacaaagtgccttctaaaaagttcaaagtgctcggcaacaccgaccggcactccatcaagaagaacctcattggagcactgctgtttgactcgggggaaactgctgaagcgactcggctgaagagaacggcacgccgccggtacacccggaggaagaatagaatctgctaccttcaagaaatcttttccaacgaaatggccaaagtcgacgacagcttcttccaccgcctggaagagtcgttcctcgtggaagaggacaagaagcacgagagaca

SEQ ID NO: 51 - RNA, 44 nt, synthetic construct
  source 1..44: mol_type = other RNA
  modified_base 1: mod_base = OTHER; note = 2'-O-methyl modified nucleotide with phosphorothioate linkage
  modified_base 2: mod_base = OTHER; note = 2'-O-methyl modified nucleotide with phosphorothioate linkage
  modified_base 8: mod_base = OTHER; note = 2'-O-methyl modified nucleotide
  modified_base 9: mod_base = OTHER; note = 2'-O-methyl modified nucleotide
  modified_base 13: mod_base = OTHER; note = 2'-O-methyl modified nucleotide
  modified_base 15: mod_base = OTHER; note = 2'-O-methyl modified nucleotide
  modified_base 16: mod_base = OTHER; note = 2'-O-methyl modified nucleotide
  modified_base 17: mod_base = OTHER; note = 2'-O-methyl modified nucleotide
  modified_base 20: mod_base = OTHER; note = 2'-O-methyl modified nucleotide
  modified_base 21: mod_base = OTHER; note = 2'-O-methyl modified nucleotide
  modified_base 22: mod_base = OTHER; note = 2'-O-methyl modified nucleotide
  modified_base 24: mod_base = OTHER; note = 2'-O-methyl modified nucleotide
  modified_base 31: mod_base = OTHER; note = 2'-O-methyl modified nucleotide
  modified_base 32: mod_base = OTHER; note = 2'-O-methyl modified nucleotide
  modified_base 33: mod_base = OTHER; note = 2'-O-methyl modified nucleotide
  modified_base 35: mod_base = OTHER; note = 2'-O-methyl modified nucleotide
  modified_base 37: mod_base = OTHER; note = 2'-O-methyl modified nucleotide
  modified_base 38: mod_base = OTHER; note = 2'-O-methyl modified nucleotide
  modified_base 42: mod_base = OTHER; note = Nucleotide with phosphorothioate linkage
  modified_base 43: mod_base = OTHER; note = 2'-O-methyl modified nucleotide with phosphorothioate linkage
  modified_base 44: mod_base = OTHER; note = 2'-O-methyl modified nucleotide
tttgaatttctactgttgtagatccttgtcaaggctattggtca

SEQ ID NO: 52 - protein, 1293 aa, synthetic construct
MARIIDEFCGQMNGYSRSITLRNRLVPIGKTEENLKQFLEKDLERATAYPDIKNLIDAIHRNVIEDTLSKVALNWNEIFNILATYQNEKDKKKKAAIKKDLEKLQSGARKKIVEAFKKNPDFEKLFKEGLFKELLPELIKSAPVDEIAVKTKALECFNRFSTYFTGFHDNRKNMYSEEAKSTAISYRIVNENFPKFFANIKLFNYLKEHFPRIIIDTEESLKDYLKGKKLDSVFSIDGFNSVLAQSGIDFYNTVIGGISGEAGTKKTQGLNEKINLARQQLSKEEKNKLRGKMVVLFKQILSDRETSSFIPVGFANKEEVYSTVKEFNNSIAEKAVSKVRDLFLHREEFTLNEIFVPAKSLTDFSQAIFGSWSILSEGLFLLEKDSMKKALSESQEEKINKEIAKKDCSFTELQLAYERYCTEHNLPVEKFCKDYFDIVDYRGNGAKSEKTKVSILSEILETFLQLDFDHIQDLQQEKNAAIPIKAYLDEVQNLYHHLKLVDYRGEEQKDSTFYSKHDEILTDLSQIVPLYNKVRNFVTKKLGESKKIKLNFDCPTLANGWDENQESSNDAIILRKDGKYYLGIYNPNNKPKFAKKDSIVGDCYEKMAYKQIALPMGLGAFVRKCFGTAQKYGWGCPENCLNSEGKIIIKDEEAKGNLEAIIDCYKDFLNKYEKDGFKYKDYNFSFLDSASYEKLSDFFNDVKPQGYKLSFTSIPLSEIDKMIDEGKLFLFQIYNKDFAKKATGKKNLHTLYWENLFSVENLQDVVLKLNGEAELFWREASIKKDKVIVHKKGSILVNRTTTDGKSIPEAIYQEIYQLKNKMADSISDEAKRLLESGTVVCKVATHDIVKDKHFTENTYLFHCPITMNFKAKDRTNKEFNNHVLEVLNKNPDIKVIGLDRGERHLLYLSLINQKGEIECQKTLNLVEQVRNDKTVSVNYHEKLVHKEGSRDAARKNWQTIGNIKELKEGYLSAVVHEIASLMVKHNAIVVMEDLNFGFKRGRFAVERQIYQKFENMLIEKLNYLVFKDRKVTEPGGVLNAYQLANKSAKVTDVYKQCGWLFYIPAAYTSKIDPRTGFANLFITKGLTNVEKKKEFFGKFDSIRYDATESCFVFSFDYAKICDNADYKKKWDVYTRGTRLVYNKTERKNVSVNPTEELQCVFDEFGIKWNTGEDLIESISLIPAEKSNAKFFDVLLRMFNATLQMRNSVPNTDTDYLVSPVKAEDGSFFDSREEFKKGGDARLPIDCDANGAYHIALKGLYLLLNDFNRDNKGVIQNISNKDWFKFVQEKVYKD

SEQ ID NO: 53 - protein, 1293 aa, synthetic construct
MARIIDEFCGQMNGYSRSITLRNRLVPIGKTEENLKQFLEKDLERATAYPDIKNLIDAIHRNVIEDTLSKVALNWNEIFNILATYQNEKDKKKKAAIKKDLEKLQSGARKKIVEAFKKNPDFEKLFKEGLFKELLPELIKSAPVDEIAVKTKALECFNRFSTYFTGFHRNRKNMYSEEAKSTAISYRIVNENFPKFFANIKLFNYLKEHFPRIIIDTEESLKDYLKGKKLDSVFSIDGFNSVLAQSGIDFYNTVIGGISGEAGTKKTQGLNEKINLARQQLSKEEKNKLRGKMVVLFKQILSDRETSSFIPVGFANKEEVYSTVKEFNNSIAEKAVSKVRDLFLHREEFTLNEIFVPAKSLTDFSQAIFGSWSILSEGLFLLEKDSMKKALSESQEEKINKEIAKKDCSFTELQLAYERYCTEHNLPVEKFCKDYFDIVDYRGNGAKSEKTKVSILSEILETFLQLDFDHIQDLQQEKNAAIPIKAYLDEVQNLYHHLKLVDYRGEEQKDSTFYSKHDEILTDLSQIVPLYNKVRNFVTKKLGESKKIKLNFDCPTLANGWDENQESSNDAIILRKDGKYYLGIYNPNNKPKFAKKDSIVGDCYEKMAYKQIALPMGLGAFVRKCFGTAQKYGWGCPENCLNSEGKIIIKDEEAKGNLEAIIDCYKDFLNKYEKDGFKYKDYNFSFLDSASYEKLSDFFNDVKPQGYKLSFTSIPLSEIDKMIDEGKLFLFQIYNKDFAKKATGKKNLHTLYWENLFSVENLQDVVLKLNGEAELFWREASIKKDKVIVHKKGSILVNRTTTDGKSIPEAIYQEIYQLKNKMADSISDEAKRLLESGTVVCKVATHDIVKDKHFTENTYLFHCPITMNFKAKDRTNKEFNNHVLEVLNKNPDIKVIGLDRGERHLLYLSLINQKGEIECQKTLNLVEQVRNDKTVSVNYHEKLVHKEGSRDAARKNWQTIGNIKELKEGYLSAVVHEIASLMVKHNAIVVMEDLNFGFKRGRFAVERQIYQKFENMLIEKLNYLVFKDRKVTEPGGVLNAYQLANKSAKVTDVYKQCGWLFYIPAAYTSKIDPRTGFANLFITKGLTNVEKKKEFFGKFDSIRYDATESCFVFSFDYAKICDNADYKKKWDVYTRGTRLVYNKTERKNVSVNPTEELQCVFDEFGIKWNTGEDLIESISLIPAEKSNAKFFDVLLRMFNATLQMRNSVPNTDTDYLVSPVKAEDGSFFDSREEFKKGGDARLPIDCDANGAYHIALKGLYLLLNDFNRDNKGVIQNISNKDWFKFVQEKVYKD

SEQ ID NO: 54 - DNA, 22 bp, synthetic construct
  source 1..22: mol_type = other DNA
cctgaattgctatgtgtctggg

SEQ ID NO: 55 - DNA, 22 bp, synthetic construct
  source 1..22: mol_type = other DNA
ctcatacacaactttcagcagc

SEQ ID NO: 56 - DNA, 20 bp, synthetic construct
  source 1..20: mol_type = other DNA
agtgggggtgaattcagtgt

SEQ ID NO: 57 - protein, 1354 aa, synthetic construct
MPAAKRVKLDGGGGARIIDEFCGQMNGYSRSITLRNRLVPIGKTEENLKQFLEKDLERATAYPDIKNLIDAIHRNVIEDTLSKVALNWNEIFNILATYQNEKDKKKKAAIKKDLEKLQSGARKKIVEAFKKNPDFEKLFKEGLFKELLPELIKSAPVDEIAVKTKALECFNRFSTYFTGFHRNRKNMYSEEAKSTAISYRIVNENFPKFFANIKLFNYLKEHFPRIIIDTEESLKDYLKGKKLDSVFSIDGFNSVLAQSGIDFYNTVIGGISGEAGTKKTQGLNEKINLARQQLSKEEKNKLRGKMVVLFKQILSDRETSSFIPVGFANKEEVYSTVKEFNNSIAEKAVSKVRDLFLHREEFTLNEIFVPAKSLTDFSQAIFGSWSILSEGLFLLEKDSMKKALSESQEEKINKEIAKKDCSFTELQLAYERYCTEHNLPVEKFCKDYFDIVDYRGNGAKSEKTKVSILSEILETFLQLDFDHIQDLQQEKNAAIPIKAYLDEVQNLYHHLKLVDYRGEEQKDSTFYSKHDEILTDLSQIVPLYNKVRNFVTKKLGESKKIKLNFDCPTLANGWDENQESSNDAIILRKDGKYYLGIYNPNNKPKFAKKDSIVGDCYEKMAYKQIALPMGLGAFVRKCFGTAQKYGWGCPENCLNSEGKIIIKDEEAKGNLEAIIDCYKDFLNKYEKDGFKYKDYNFSFLDSASYEKLSDFFNDVKPQGYKLSFTSIPLSEIDKMIDEGKLFLFQIYNKDFAKKATGKKNLHTLYWENLFSVENLQDVVLKLNGEAELFWREASIKKDKVIVHKKGSILVNRTTTDGKSIPEAIYQEIYQLKNKMADSISDEAKRLLESGTVVCKVATHDIVKDKHFTENTYLFHCPITMNFKAKDRTNKEFNNHVLEVLNKNPDIKVIGLDRGERHLLYLSLINQKGEIECQKTLNLVEQVRNDKTVSVNYHEKLVHKEGSRDAARKNWQTIGNIKELKEGYLSAVVHEIASLMVKHNAIVVMEDLNFGFKRGRFAVERQIYQKFENMLIEKLNYLVFKDRKVTEPGGVLNAYQLANKSAKVTDVYKQCGWLFYIPAAYTSKIDPRTGFANLFITKGLTNVEKKKEFFGKFDSIRYDATESCFVFSFDYAKICDNADYKKKWDVYTRGTRLVYNKTERKNVSVNPTEELQCVFDEFGIKWNTGEDLIESISLIPAEKSNAKFFDVLLRMFNATLQMRNSVPNTDTDYLVSPVKAEDGSFFDSREEFKKGGDARLPIDCDANGAYHIALKGLYLLLNDFNRDNKGVIQNISNKDWFKFVQEKVYKDGGGGGRSSDDEATADSQHAAPPKKKRKVGGGGKRPAATKKAGQAKKKK

SEQ ID NO: 58 - protein, 1354 aa, synthetic construct
MPAAKRVKLDGGGGARIIDEFCGQMNGYSRSITLRNRLVPIGKTEENLKQFLEKDLERATAYPDIKNLIDAIHRNVIEDTLSKVALNWNEIFNILATYQNEKDKKKKAAIKKDLEKLQSGARKKIVEAFKKNPDFEKLFKEGLFKELLPELIKSAPVDEIAVKTKALECFNRFSTYFTGFHRNRKNMYSEEAKSTAISYRIVNENFPKFFANIKLFNYLKEHFPRIIIDTEESLKDYLKGKKLDSVFSIDGFNSVLAQSGIDFYNTVIGGISGEAGTKKTQGLNEKINLARQQLSKEEKNKLRGKMVVLFKQILSDRETSSFIPVGFANKEEVYSTVKEFNNSIAEKAVSKVRDLFLHREEFTLNEIFVPAKSLTDFSQAIFGSWSILSEGLFLLEKDSMKKALSESQEEKINKEIAKKDCSFTELQLAYERYCTEHNLPVEKFCKDYFDIVDYRGNGAKSEKTKVSILSEILETFLQLDFDHIQDLQQEKNAAIPIKAYLDEVQNLYHHLKLVDYRGEEQKDSTFYSKHDEILTDLSQIVPLYNKVRNFVTKKLGESKKIKLNFDCPTLANGWDENQESSNDAIILRKDGKYYLGIYNPNNKPKFAKKDSIVGDCYEKMAYKQIALPMGLGAFVRKCFGTAQKYGWGCPENCLNSEGKIIIKDEEAKGNLEAIIDCYKDFLNKYEKDGFKYKDYNFSFLDSASYEKLSDFFNDVKPQGYKLSFTSIPLSEIDKMIDEGKLFLFQIYNKDFRKKATGKKNLHTLYWENLFSVENLQDVVLKLNGEAELFWREASIKKDKVIVHKKGSILVNRTTTDGKSIPEAIYQEIYQLKNKMADSISDEAKRLLESGTVVCKVATHDIVKDKHFTENTYLFHCPITMNFKAKDRTNKEFNNHVLEVLNKNPDIKVIGLDRGERHLLYLSLINQKGEIECQKTLNLVEQVRNDKTVSVNYHEKLVHKEGSRDAARKNWQTIGNIKELKEGYLSAVVHEIASLMVKHNAIVVMEDLNFGFKRGRFAVERQIYQKFENMLIEKLNYLVFKDRKVTEPGGVLNAYQLANKSAKVTDVYKQCGWLFYIPAAYTSKIDPRTGFANLFITKGLTNVEKKKEFFGKFDSIRYDATESCFVFSFDYAKICDNADYKKKWDVYTRGTRLVYNKTERKNVSVNPTEELQCVFDEFGIKWNTGEDLIESISLIPAEKSNAKFFDVLLRMFNATLQMRNSVPNTDTDYLVSPVKAEDGSFFDSREEFKKGGDARLPIDCDANGAYHIALKGLYLLLNDFNRDNKGVIQNISNKDWFKFVQEKVYKDGGGGGRSSDDEATADSQHAAPPKKKRKVGGGGKRPAATKKAGQAKKKK

SEQ ID NO: 59 - protein, 1354 aa, synthetic construct
MPAAKRVKLDGGGGARIIDEFCGQMNGYSRSITLRNRLVPIGKTEENLKQFLEKDLERATAYPDIKNLIDAIHRNVIEDTLSKVALNWNEIFNILATYQNEKDKKKKAAIKKDLEKLQSGARKKIVEAFKKNPDFEKLFKEGLFKELLPELIKSAPVDEIAVKTKALECFNRFSTYFTGFHRNRKNMYSEEAKSTAISYRIVNENFPKFFANIKLFNYLKEHFPRIIIDTEESLKDYLKGKKLDSVFSIDGFNSVLAQSGIDFYNTVIGGISGEAGTKKTQGLNEKINLARQQLSKEEKNKLRGKMVRLFKQILSDRETSSFIPVGFANKEEVYSTVKEFNNSIAEKAVSKVRDLFLHREEFTLNEIFVPAKSLTDFSQAIFGSWSILSEGLFLLEKDSMKKALSESQEEKINKEIAKKDCSFTELQLAYERYCTEHNLPVEKFCKDYFDIVDYRGNGAKSEKTKVSILSEILETFLQLDFDHIQDLQQEKNAAIPIKAYLDEVQNLYHHLKLVDYRGEEQKDSTFYSKHDEILTDLSQIVPLYNKVRNFVTKKLGESKKIKLNFDCPTLANGWDENQESSNDAIILRKDGKYYLGIYNPNNKPKFAKKDSIVGDCYEKMAYKQIALPMGLGAFVRKCFGTAQKYGWGCPENCLNSEGKIIIKDEEAKGNLEAIIDCYKDFLNKYEKDGFKYKDYNFSFLDSASYEKLSDFFNDVKPQGYKLSFTSIPLSEIDKMIDEGKLFLFQIYNKDFAKKATGKKNLHTLYWENLFSVENLQDVVLKLNGEAELFWREASIKKDKVIVHKKGSILVNRTTTDGKSIPEAIYQEIYQLKNKMADSISDEAKRLLESGTVVCKVATHDIVKDKHFTENTYLFHCPITMNFKAKDRTNKEFNNHVLEVLNKNPDIKVIGLDRGERHLLYLSLINQKGEIECQKTLNLVEQVRNDKTVSVNYHEKLVHKEGSRDAARKNWQTIGNIKELKEGYLSAVVHEIASLMVKHNAIVVMEDLNFGFKRGRFAVERQIYQKFENMLIEKLNYLVFKDRKVTEPGGVLNAYQLANKSAKVTDVYKQCGWLFYIPAAYTSKIDPRTGFANLFITKGLTNVEKKKEFFGKFDSIRYDATESCFVFSFDYAKICDNADYKKKWDVYTRGTRLVYNKTERKNVSVNPTEELQCVFDEFGIKWNTGEDLIESISLIPAEKSNAKFFDVLLRMFNATLQMRNSVPNTDTDYLVSPVKAEDGSFFDSREEFKKGGDARLPIDCDANGAYHIALKGLYLLLNDFNRDNKGVIQNISNKDWFKFVQEKVYKDGGGGGRSSDDEATADSQHAAPPKKKRKVGGGGKRPAATKKAGQAKKKK

SEQ ID NO: 60 - protein, 1354 aa, synthetic construct
MPAAKRVKLDGGGGARIIDEFCGQMNGYSRSITLRNRLVPIGKTEENLKQFLEKDLERATAYPDIKNLIDAIHRNVIEDTLSKVALNWNEIFNILATYQNEKDKKKKAAIKKDLEKLQSGARKKIVEAFKKNPDFEKLFKEGLFKELLPELIKSAPVDEIAVKTKALECFNRFSTYFTGFHRNRKNMYSEEAKSTAISYRIVNENFPKFFANIKLFNYLKEHFPRIIIDTEESLKDYLKGKKLDSVFSIDGFNSVLAQSGIDFYNTVIGGISGEAGTKKTQGLNEKINLARQQLSKEEKNKLRGKMVVLFKQILSDRETSSFIPVGFANKEEVYSTVKEFNNSIAEKAVSKVRDLFLHREEFTLNEIFVPAKSLTDFSQAIFGSWSILSEGLFLLEKDSMKKALSESQEEKINKEIAKKDCSFTELQLAYERYCTEHNLPVEKFCKDYFDIVDYRGNGAKSEKTKVSILSEILETFLQLDFDHIQDLQQEKNAAIPIKAYLDEVQNLYHHLKLVDYRGEEQKDSTFYSKHDEILTDLSQIVPLYNKVRNFVTKKLGESKKIKLNFDCPTLANGWDENQESSNDAIILRKDGKYYLGIYNPNNKPKFAKKDSIVGDCYEKMAYKQIALPMGLGAFVRKCFGTAQKYGWGCPENCLNSEGKIIIKDEEAKGNLEAIIDCYKDFLNKYEKDGFKYKDYNFSFLDSASYEKLSDFFNDVKPQGYKLSFTSIPLSEIDKMIDEGKLFLFQIYNKDFAKKATGKKNLHTLYWENLFSVENLQDVVLKLNGEAELFWREASIKKDKVIVHKKGSILVNRTTTDGKSIPEAIYQEIYQLKNKMADSISDEAKRLLESGTVVCKVARHDIVKDKHFTENTYLFHCPITMNFKAKDRTNKEFNNHVLEVLNKNPDIKVIGLDRGERHLLYLSLINQKGEIECQKTLNLVEQVRNDKTVSVNYHEKLVHKEGSRDAARKNWQTIGNIKELKEGYLSAVVHEIASLMVKHNAIVVMEDLNFGFKRGRFAVERQIYQKFENMLIEKLNYLVFKDRKVTEPGGVLNAYQLANKSAKVTDVYKQCGWLFYIPAAYTSKIDPRTGFANLFITKGLTNVEKKKEFFGKFDSIRYDATESCFVFSFDYAKICDNADYKKKWDVYTRGTRLVYNKTERKNVSVNPTEELQCVFDEFGIKWNTGEDLIESISLIPAEKSNAKFFDVLLRMFNATLQMRNSVPNTDTDYLVSPVKAEDGSFFDSREEFKKGGDARLPIDCDANGAYHIALKGLYLLLNDFNRDNKGVIQNISNKDWFKFVQEKVYKDGGGGGRSSDDEATADSQHAAPPKKKRKVGGGGKRPAATKKAGQAKKKK

SEQ ID NO: 61 - protein, 1354 aa, synthetic construct
MPAAKRVKLDGGGGARIIDEFCGQMNGYSRSITLRNRLVPIGKTEENLKQFLEKDLERATAYPDIKNLIDAIHRNVIEDTLSKVALNWNEIFNILATYQNEKDKKKKAAIKKDLEKLQSGARKKIVEAFKKNPDFEKLFKEGLFKELLPELIKSAPVDEIAVKTKALECFNRFSTYFTGFHRNRKNMYSEEAKSTAISYRIVNENFPKFFANIKLFNYLKEHFPRIIIDTEESLKDYLKGKKLDSVFSIDGFNSVLAQSGIDFYNTVIGGISGEAGTKKTQGLNEKINLARQQLSKEEKNKLRGKMVVLFKQILSDRERSSFIPVGFANKEEVYSTVKEFNNSIAEKAVSKVRDLFLHREEFTLNEIFVPAKSLTDFSQAIFGSWSILSEGLFLLEKDSMKKALSESQEEKINKEIAKKDCSFTELQLAYERYCTEHNLPVEKFCKDYFDIVDYRGNGAKSEKTKVSILSEILETFLQLDFDHIQDLQQEKNAAIPIKAYLDEVQNLYHHLKLVDYRGEEQKDSTFYSKHDEILTDLSQIVPLYNKVRNFVTKKLGESKKIKLNFDCPTLANGWDENQESSNDAIILRKDGKYYLGIYNPNNKPKFAKKDSIVGDCYEKMAYKQIALPMGLGAFVRKCFGTAQKYGWGCPENCLNSEGKIIIKDEEAKGNLEAIIDCYKDFLNKYEKDGFKYKDYNFSFLDSASYEKLSDFFNDVKPQGYKLSFTSIPLSEIDKMIDEGKLFLFQIYNKDFAKKATGKKNLHTLYWENLFSVENLQDVVLKLNGEAELFWREASIKKDKVIVHKKGSILVNRTTTDGKSIPEAIYQEIYQLKNKMADSISDEAKRLLESGTVVCKVATHDIVKDKHFTENTYLFHCPITMNFKAKDRTNKEFNNHVLEVLNKNPDIKVIGLDRGERHLLYLSLINQKGEIECQKTLNLVEQVRNDKTVSVNYHEKLVHKEGSRDAARKNWQTIGNIKELKEGYLSAVVHEIASLMVKHNAIVVMEDLNFGFKRGRFAVERQIYQKFENMLIEKLNYLVFKDRKVTEPGGVLNAYQLANKSAKVTDVYKQCGWLFYIPAAYTSKIDPRTGFANLFITKGLTNVEKKKEFFGKFDSIRYDATESCFVFSFDYAKICDNADYKKKWDVYTRGTRLVYNKTERKNVSVNPTEELQCVFDEFGIKWNTGEDLIESISLIPAEKSNAKFFDVLLRMFNATLQMRNSVPNTDTDYLVSPVKAEDGSFFDSREEFKKGGDARLPIDCDANGAYHIALKGLYLLLNDFNRDNKGVIQNISNKDWFKFVQEKVYKDGGGGGRSSDDEATADSQHAAPPKKKRKVGGGGKRPAATKKAGQAKKKK

SEQ ID NO: 62 - protein, 1354 aa, synthetic construct
MPAAKRVKLDGGGGARIIDEFCGQMNGYSRSITLRNRLVPIGKTEENLKQFLEKDLERATAYPDIKNLIDAIHRNVIEDTLSKVALNWNEIFNILATYQNEKDKKKKAAIKKDLEKLQSGARKKIVEAFKKNPDFEKLFKEGLFKELLPELIKSAPVDEIAVKTKALECFNRFSTYFTGFHRNRKNMYSEEAKSTAISYRIVNENFPKFFANIKLFNYLKEHFPRIIIDTEESLKDYLKGKKLDSVFSIDGFNSVLAQSGIDFYNTVIGGISGEAGTKKTQGLNEKINLARQQLSKEEKNKLRGKMVVLFKQILSDRETSSFIPVGFANKEEVYSTVKEFNNSIAEKAVSKVRDLFLHREEFTLNEIFVPAKSLTDFSQAIFGSWSILSEGLFLLEKDSMKKALSESQEEKINKEIAKKDCSFTELQLAYERYCTEHNLPVEKFCKDYFDIVDYRGNGAKSEKTKVSILSEILETFLQLDFDHIQDLQQEKNAAIPIKAYLDEVQNLYHHLKLVDYRGEEQKDSTFYSKHDEILTDLSQIVPLYNKVRNFVTKKLGESKKIKLNFDCPTLANGWDENQESSNDAIILRKDGKYYLGIYNPNNKPKFAKKDSIVGDCYEKMAYKQIALPMGLGAFVRKCFGTAQKYGWGCPENCLNSEGKIIIKDEEAKGNLEAIIDCYKDFLNKYEKDGFKYKDYNFSFLDSASYEKLSDFFNDVKPQGYKLSFTSIPLSEIDKMIDEGKLFLFQIYNKDFAKKATGKKNLHTLYWENLFSVENLQDVVLKLNGEAELFWREASIKKDKVIVHKKGSILVNRTTTDGKSIPEAIYQEIYQLKNKMADSISDEAKRLLESGTVVCKVATHDIVKDKHFTENTYLFHCPITMNFKAKDRTNKEFNNHVLEVLNKNPDIKVIGLDRGERHLLYLSLINQKGEIECQKTLNLVEQVRNDKTVSVNYHEKLVHKEGSRDAARKNWQTIGNIKELKEGYLRAVVHEIASLMVKHNAIVVMEDLNFGFKRGRFAVERQIYQKFENMLIEKLNYLVFKDRKVTEPGGVLNAYQLANKSAKVTDVYKQCGWLFYIPAAYTSKIDPRTGFANLFITKGLTNVEKKKEFFGKFDSIRYDATESCFVFSFDYAKICDNADYKKKWDVYTRGTRLVYNKTERKNVSVNPTEELQCVFDEFGIKWNTGEDLIESISLIPAEKSNAKFFDVLLRMFNATLQMRNSVPNTDTDYLVSPVKAEDGSFFDSREEFKKGGDARLPIDCDANGAYHIALKGLYLLLNDFNRDNKGVIQNISNKDWFKFVQEKVYKDGGGGGRSSDDEATADSQHAAPPKKKRKVGGGGKRPAATKKAGQAKKKK

SEQ ID NO: 63 - protein, 1354 aa, synthetic construct
MPAAKRVKLDGGGGARIIDEFCGQMNGYSRSITLRNRLVPIGKTEENLKQFLEKDLERATAYPDIKNLIDAIHRNVIEDTLSKVALNWNEIFNILATYQNEKDKKKKAAIKKDLEKLQSGARKKIVEAFKKNPDFEKLFKEGLFKELLPELIKSAPVDEIAVKTKALECFNRFSTYFTGFHRNRKNMYSEEAKSTAISYRIVNENFPKFFANIKLFNYLKEHFPRIIIDTEESLKDYLKGKKLDSVFSIDGFNSVLAQSGIDFYNTVIGGISGEAGTKKTQGLNEKINLARQQLSKEEKNKLRGKMVVLFKQILSDRETSSFIPVGFANKEEVYSTVKEFNNSIAEKAVSKVRDLFLHREEFTLNEIFVPAKSLTDFSQAIFGSWSILSEGLFLLEKDSMKKALSESQEEKINKEIAKKDCSFTELQLAYERYCTEHNLPVEKFCKDYFDIVDYRGNGAKSEKTKVSILSEILETFLQLDFDHIQDLQQEKNAAIPIKAYLDEVQNLYHHLKLVDYRGEEQKDSTFYSKHDEILTDLSQIVPLYNKVRNFVTKKLGESKKIKLNFDCPTLANGWDENQESSNDAIILRKDGKYYLGIYNPNNKPKFAKKDSIVGDCYEKMAYKQIALPMGLGAFVRKCFGTAQKYGWGCPENCLNSEGKIIIKDEEAKGNLEAIIDCYKDFLNKYEKRGFKYKDYNFSFLDSASYEKLSDFFNDVKPQGYKLSFTSIPLSEIDKMIDEGKLFLFQIYNKDFAKKATGKKNLHTLYWENLFSVENLQDVVLKLNGEAELFWREASIKKDKVIVHKKGSILVNRTTTDGKSIPEAIYQEIYQLKNKMADSISDEAKRLLESGTVVCKVATHDIVKDKHFTENTYLFHCPITMNFKAKDRTNKEFNNHVLEVLNKNPDIKVIGLDRGERHLLYLSLINQKGEIECQKTLNLVEQVRNDKTVSVNYHEKLVHKEGSRDAARKNWQTIGNIKELKEGYLSAVVHEIASLMVKHNAIVVMEDLNFGFKRGRFAVERQIYQKFENMLIEKLNYLVFKDRKVTEPGGVLNAYQLANKSAKVTDVYKQCGWLFYIPAAYTSKIDPRTGFANLFITKGLTNVEKKKEFFGKFDSIRYDATESCFVFSFDYAKICDNADYKKKWDVYTRGTRLVYNKTERKNVSVNPTEELQCVFDEFGIKWNTGEDLIESISLIPAEKSNAKFFDVLLRMFNATLQMRNSVPNTDTDYLVSPVKAEDGSFFDSREEFKKGGDARLPIDCDANGAYHIALKGLYLLLNDFNRDNKGVIQNISNKDWFKFVQEKVYKDGGGGGRSSDDEATADSQHAAPPKKKRKVGGGGKRPAATKKAGQAKKKK

SEQ ID NO: 64 - protein, 1354 aa, synthetic construct
MPAAKRVKLDGGGGARIIDEFCGQMNGYSRSITLRNRLVPIGKTEENLKQFLEKDLERATAYPDIKNLIDAIHRNVIEDTLSKVALNWNEIFNILATYQNEKDKKKKAAIKKDLEKLQSGARKKIVEAFKKNPDFEKLFKEGLFKELLPELIKSAPVDEIAVKTKALECFNRFSTYFTGFHRNRKNMYSEEAKSTAISYRIVNENFPKFFANIKLFNYLKEHFPRIIIDTEESLKDYLKGKKLDSVFSIDGFNSVLAQSGIDFYNTVIGGISGEAGTKKTQGLNEKINLARQQLSKEEKNKLRGKMVVLFKQILSDRETSSFIPVGFANKEEVYSTVKEFNNSIAEKAVSKVRDLFLHREEFTLNEIFVPAKSLTDFSQAIFGSWSILSEGLFLLEKDSMKKALSESQEEKINKEIAKKDCSFTELQLAYERYCTEHNLPVEKFCKDYFDIVDYRGNGAKSEKTKVSILSEILETFLQLDFDHIQDLQQEKNAAIPIKAYLDEVRNLYHHLKLVDYRGEEQKDSTFYSKHDEILTDLSQIVPLYNKVRNFVTKKLGESKKIKLNFDCPTLANGWDENQESSNDAIILRKDGKYYLGIYNPNNKPKFAKKDSIVGDCYEKMAYKQIALPMGLGAFVRKCFGTAQKYGWGCPENCLNSEGKIIIKDEEAKGNLEAIIDCYKDFLNKYEKDGFKYKDYNFSFLDSASYEKLSDFFNDVKPQGYKLSFTSIPLSEIDKMIDEGKLFLFQIYNKDFAKKATGKKNLHTLYWENLFSVENLQDVVLKLNGEAELFWREASIKKDKVIVHKKGSILVNRTTTDGKSIPEAIYQEIYQLKNKMADSISDEAKRLLESGTVVCKVATHDIVKDKHFTENTYLFHCPITMNFKAKDRTNKEFNNHVLEVLNKNPDIKVIGLDRGERHLLYLSLINQKGEIECQKTLNLVEQVRNDKTVSVNYHEKLVHKEGSRDAARKNWQTIGNIKELKEGYLSAVVHEIASLMVKHNAIVVMEDLNFGFKRGRFAVERQIYQKFENMLIEKLNYLVFKDRKVTEPGGVLNAYQLANKSAKVTDVYKQCGWLFYIPAAYTSKIDPRTGFANLFITKGLTNVEKKKEFFGKFDSIRYDATESCFVFSFDYAKICDNADYKKKWDVYTRGTRLVYNKTERKNVSVNPTEELQCVFDEFGIKWNTGEDLIESISLIPAEKSNAKFFDVLLRMFNATLQMRNSVPNTDTDYLVSPVKAEDGSFFDSREEFKKGGDARLPIDCDANGAYHIALKGLYLLLNDFNRDNKGVIQNISNKDWFKFVQEKVYKDGGGGGRSSDDEATADSQHAAPPKKKRKVGGGGKRPAATKKAGQAKKKK

SEQ ID NO: 65 - protein, 1354 aa, synthetic construct
MPAAKRVKLDGGGGARIIDEFCGQMNGYSRSITLRNRLVPIGKTEENLKQFLEKDLERATAYPDIKNLIDAIHRNVIEDTLSKVALNWNEIFNILATYQNEKDKKKKAAIKKDLEKLQSGARKKIVEAFKKNPDFEKLFKEGLFKELLPELIKSAPVDEIAVKTKALECFNRFSTYFTGFHRNRKNMYSEEAKSTAISYRIVNENFPKFFANIKLFNYLKEHFPRIIIDTEESLKDYLKGKKLDSVFSIDGFNSVLAQSGIDFYNTVIGGISGEAGTKKTQGLNEKINLARQQLSKEEKNKLRGKMVVLFKQILSDRETSSFIPVGFANKEEVYSTVKEFNNSIAEKAVSKVRDLFLHREEFTLNEIFVPAKSLTDFSQAIFGSWSILSEGLFLLEKDSMKKALSESQEEKINKEIAKKDCSFTELQLAYERYCTEHNLPVEKFCKDYFDIVDYRGNGAKSEKTKVSILSEILETFLQLDFDHIQDLQQEKNAAIPIKAYLDEVQNLYHHLKLVDYRGEEQKDSTFYSKHDEILTDLSQIVPLYNKVRNFVTKKLGESKKIKLNFDCPTLANGWDENQESSNDAIILRKDGKYYLGIYNPNNKPKFAKKDSIVGDCYEKMAYKQIALPMGLGAFVRKCFGTAQKYGWGCPENCLNSEGKIIIKDEEAKGNLEAIIDCYKDFLNKYEKDGFKYKDYNFSFLDSASYEKLSDFFNDVKPQGYKLSFTSIPLSEIDKMIDEGKLFLFQIYNKDFAKKATGKKNLHTLYWENLFSVENLQDVVLKLNGEAELFWREASIKKDKVIVHKKGSILVNRTTTDGKSIPEAIYQEIYQLKNKMADSISDEAKRLLESGTVVCKVATHDIVKDKHFTENTYLFHCPITMNFKAKDRTNKEFNNHVLEVLNKNPDIKVIGLDRGERHLLYLSLINQKGEIECQKTLNLVEQVRNDKTVSVNYHEKLVHKEGSRDAARKNWQTIGNIKELKEGYLSAVVHEIASLMVKHNAIVVMEDLNFGFKRGRFAVERQIYQKFERMLIEKLNYLVFKDRKVTEPGGVLNAYQLANKSAKVTDVYKQCGWLFYIPAAYTSKIDPRTGFANLFITKGLTNVEKKKEFFGKFDSIRYDATESCFVFSFDYAKICDNADYKKKWDVYTRGTRLVYNKTERKNVSVNPTEELQCVFDEFGIKWNTGEDLIESISLIPAEKSNAKFFDVLLRMFNATLQMRNSVPNTDTDYLVSPVKAEDGSFFDSREEFKKGGDARLPIDCDANGAYHIALKGLYLLLNDFNRDNKGVIQNISNKDWFKFVQEKVYKDGGGGGRSSDDEATADSQHAAPPKKKRKVGGGGKRPAATKKAGQAKKKK

SEQ ID NO: 66 - protein, 1354 aa, synthetic construct
MPAAKRVKLDGGGGARIIDEFCGQMNGYSRSITLRNRLVPIGKTEENLKQFLEKDLERATAYPDIKNLIDAIHRNVIEDTLSKVALNWNEIFNILATYQNEKDKKKKAAIKKDLEKLQSGARKKIVEAFKKNPDFEKLFKEGLFKELLPELIKSAPVDEIAVKTKALECFNRFSTYFTGFHRNRKNMYSEEAKSTAISYRIVNENFPKFFANIKLFNYLKEHFPRIIIDTEESLKDYLKGKKLDSVFSIDGFNSVLAQSGIDFYNTVIGGISGEAGTKKTQGLNEKINLARQQLSKEEKNKLRGKMVVLFKQILSDRETSSFIPVGFANKEEVYSTVKEFNNSIAEKAVSKVRDLFLHREEFTLNEIFVPAKSLTDFSQAIFGSWSILSEGLFLLEKDSMKKALSESQEEKINKEIAKKDCSFTELQLAYERYCTEHNLPVEKFCKDYFDIVDYRGNGAKSEKTKVSILSEILETFLQLDFDHIQDLQQEKNAAIPIKAYLDEVQNLYHHLKLVDYRGEEQKDSTFYSKHDEILTDLSQIVPLYNKVRNFVTKKLGESKKIKLNFDCPTLANGWDENQESSNDAIILRKDGKYYLGIYNPNNKPKFAKKDSIVGDCYEKMAYKQIALPMGLGAFVRKCFGTAQKYGWGCPENCLNSEGKIIIKDEEAKGNLEAIIDCYKDFLNKYEKDGFKYKDYNFSFLDSASYEKLSDFFNDVKPQGYKLSFTSIPLSEIDKMIDEGKLFLFQIYNKDFAKKATGKKNLHTLYWENLFSVENLQDVVLKLNGEAELFWREASIKKDKVIVHKKGSILVRRTTTDGKSIPEAIYQEIYQLKNKMADSISDEAKRLLESGTVVCKVATHDIVKDKHFTENTYLFHCPITMNFKAKDRTNKEFNNHVLEVLNKNPDIKVIGLDRGERHLLYLSLINQKGEIECQKTLNLVEQVRNDKTVSVNYHEKLVHKEGSRDAARKNWQTIGNIKELKEGYLSAVVHEIASLMVKHNAIVVMEDLNFGFKRGRFAVERQIYQKFENMLIEKLNYLVFKDRKVTEPGGVLNAYQLANKSAKVTDVYKQCGWLFYIPAAYTSKIDPRTGFANLFITKGLTNVEKKKEFFGKFDSIRYDATESCFVFSFDYAKICDNADYKKKWDVYTRGTRLVYNKTERKNVSVNPTEELQCVFDEFGIKWNTGEDLIESISLIPAEKSNAKFFDVLLRMFNATLQMRNSVPNTDTDYLVSPVKAEDGSFFDSREEFKKGGDARLPIDCDANGAYHIALKGLYLLLNDFNRDNKGVIQNISNKDWFKFVQEKVYKDGGGGGRSSDDEATADSQHAAPPKKKRKVGGGGKRPAATKKAGQAKKKK

SEQ ID NO: 67 - protein, 1354 aa, synthetic construct
MPAAKRVKLDGGGGARIIDEFCGQMNGYSRSITLRNRLVPIGKTEENLKQFLEKDLERATAYPDIKNLIDAIHRNVIEDTLSKVALNWNEIFNILATYQNEKDKKKKAAIKKDLEKLQSGARKKIVEAFKKNPDFEKLFKEGLFKELLPELIKSAPVDEIAVKTKALECFNRFSTYFTGFHRNRKNMYSEEAKSTAISYRIVNENFPKFFANIKLFNYLKEHFPRIIIDTEESLKDYLKGKKLDSVFSIDGFNSVLAQSGIDFYNTVIGGISGEAGTKKTQGLNEKINLARQQLSKEEKNKLRGKMVVLFKQILSDRETSSFIPVGFANKEEVYSTVKEFNNSIAEKAVSKVRDLFLHREEFTLNEIFVPAKSLTDFSQAIFGSWSILSEGLFLLEKDSMKKALSESQEEKINKEIAKKDCSFTELQLAYERYCTEHNLPVEKFCKDYFDIVDYRGNGAKSEKTKVSILSEILETFLQLDFDHIQDLQQEKNAAIPIKAYLDEVQNLYHHLKLVDYRGEEQKDSTFYSKHDEILTDLSQIVPLYNKVRNFVTKKLGESKKIKLNFDCPTLANGWDENQESSNDAIILRKDGKYYLGIYNPNNKPKFAKKDSIVGDCYEKMAYKQIALPMGLGAFVRKCFGTAQKYGWGCPENCLNSEGKIIIKDEEAKGNLEAIIDCYKDFLNKYEKDGFKYKDYNFSFLDSASYEKLSDFFNDVKPQGYKLSFTSIPLSEIDKMIDEGKLFLFQIYNKDFAKKATGKKNLHTLYWENLFSVENLQDVVLKLRGEAELFWREASIKKDKVIVHKKGSILVNRTTTDGKSIPEAIYQEIYQLKNKMADSISDEAKRLLESGTVVCKVATHDIVKDKHFTENTYLFHCPITMNFKAKDRTNKEFNNHVLEVLNKNPDIKVIGLDRGERHLLYLSLINQKGEIECQKTLNLVEQVRNDKTVSVNYHEKLVHKEGSRDAARKNWQTIGNIKELKEGYLSAVVHEIASLMVKHNAIVVMEDLNFGFKRGRFAVERQIYQKFENMLIEKLNYLVFKDRKVTEPGGVLNAYQLANKSAKVTDVYKQCGWLFYIPAAYTSKIDPRTGFANLFITKGLTNVEKKKEFFGKFDSIRYDATESCFVFSFDYAKICDNADYKKKWDVYTRGTRLVYNKTERKNVSVNPTEELQCVFDEFGIKWNTGEDLIESISLIPAEKSNAKFFDVLLRMFNATLQMRNSVPNTDTDYLVSPVKAEDGSFFDSREEFKKGGDARLPIDCDANGAYHIALKGLYLLLNDFNRDNKGVIQNISNKDWFKFVQEKVYKDGGGGGRSSDDEATADSQHAAPPKKKRKVGGGGKRPAATKKAGQAKKKK

SEQ ID NO: 68 - protein, 1354 aa, synthetic construct
MPAAKRVKLDGGGGARIIDEFCGQMNGYSRSITLRNRLVPIGKTEENLKQFLEKDLERATAYPDIKNLIDAIHRNVIEDTLSKVALNWNEIFNILATYQNEKDKKKKAAIKKDLEKLQSGARKKIVEAFKKNPDFEKLFKEGLFKELLPELIKSAPVDEIAVKTKALECFNRFSTYFTGFHRNRKNMYSEEAKSTAISYRIVNENFPKFFANIKLFNYLKEHFPRIIIDTEESLKDYLKGKKLDSVFSIDGFNSVLAQSGIDFYNTVIGGISGEAGTKKTQGLNEKINLARQQLSKEEKNKLRGKMVVLFKQILSDRETSSFIPVGFANKEEVYSTVKEFNNSIAEKAVSKVRDLFLHREEFTLNEIFVPAKSLTDFSQAIFGSWSILSEGLFLLEKDSMKKALSESQEEKINKEIAKKDCSFTELQLAYERYCTEHNLPVEKFCKDYFDIVDYRGNGAKSEKTKVSILSEILETFLQLDFDHIQDLQQEKNAAIPIKAYLDEVQNLYHHLKLVDYRGEEQKDSTFYSKHDEILTDLSQIVPLYNKVRRFVTKKLGESKKIKLNFDCPTLANGWDENQESSNDAIILRKDGKYYLGIYNPNNKPKFAKKDSIVGDCYEKMAYKQIALPMGLGAFVRKCFGTAQKYGWGCPENCLNSEGKIIIKDEEAKGNLEAIIDCYKDFLNKYEKDGFKYKDYNFSFLDSASYEKLSDFFNDVKPQGYKLSFTSIPLSEIDKMIDEGKLFLFQIYNKDFAKKATGKKNLHTLYWENLFSVENLQDVVLKLNGEAELFWREASIKKDKVIVHKKGSILVNRTTTDGKSIPEAIYQEIYQLKNKMADSISDEAKRLLESGTVVCKVATHDIVKDKHFTENTYLFHCPITMNFKAKDRTNKEFNNHVLEVLNKNPDIKVIGLDRGERHLLYLSLINQKGEIECQKTLNLVEQVRNDKTVSVNYHEKLVHKEGSRDAARKNWQTIGNIKELKEGYLSAVVHEIASLMVKHNAIVVMEDLNFGFKRGRFAVERQIYQKFENMLIEKLNYLVFKDRKVTEPGGVLNAYQLANKSAKVTDVYKQCGWLFYIPAAYTSKIDPRTGFANLFITKGLTNVEKKKEFFGKFDSIRYDATESCFVFSFDYAKICDNADYKKKWDVYTRGTRLVYNKTERKNVSVNPTEELQCVFDEFGIKWNTGEDLIESISLIPAEKSNAKFFDVLLRMFNATLQMRNSVPNTDTDYLVSPVKAEDGSFFDSREEFKKGGDARLPIDCDANGAYHIALKGLYLLLNDFNRDNKGVIQNISNKDWFKFVQEKVYKDGGGGGRSSDDEATADSQHAAPPKKKRKVGGGGKRPAATKKAGQAKKKK

SEQ ID NO: 69 - protein, 1354 aa, synthetic construct
MPAAKRVKLDGGGGARIIDEFCGQMNGYSRSITLRNRLVPIGKTEENLKQFLEKDLERATAYPDIKNLIDAIHRNVIEDTLSKVALNWNEIFNILATYQNEKDKKKKAAIKKDLEKLQSGARKKIVEAFKKNPDFEKLFKEGLFKELLPELIKSAPVDEIAVKTKALECFNRFSTYFTGFHRNRKNMYSEEAKSTAISYRIVNENFPKFFANIKLFNYLKEHFPRIIIDTEESLKDYLKGKKLDSVFSIDGFNSVLAQSGIDFYNTVIGGISGEAGTKKTQGLNEKINLARQQLSKEEKNKLRGKMVVLFKQILSDRETSSFIPVGFANKEEVYSTVKEFNNSIAEKAVSKVRDLFLHREEFTLNEIFVPAKSLTDFSQAIFGSWSILSEGLFLLEKDSMKKALSESQEEKINKEIAKKDCSFTELQLAYERYCTEHNLPVEKFCKDYFDIVDYRGNGAKSEKTKVSILSEILETFLQLDFDHIQDLQQEKNAAIPIKAYLDEVQNLYHHLKLVDYRGEEQKDSTFYSKHDEILTDLSQIVPLYNKVRNFVTKKLGESKKIKLNFDCPTLANGWDENQESSNDAIILRKDGKYYLGIYNPNNKPKFAKKDSIVGDCYEKMAYKQIALPMGLGAFVRKCFGTAQKYGWGCPENCLNSEGKIIIKDEEAKGNLEAIIDCYKDFLNKYEKDGFKYKDYNFSFLDSASYEKLSDFFNDVKPQGYKLSFTSIPLSEIDKMIDEGKLFLFQIYNKDFAKKATGKKNRHTLYWENLFSVENLQDVVLKLNGEAELFWREASIKKDKVIVHKKGSILVNRTTTDGKSIPEAIYQEIYQLKNKMADSISDEAKRLLESGTVVCKVATHDIVKDKHFTENTYLFHCPITMNFKAKDRTNKEFNNHVLEVLNKNPDIKVIGLDRGERHLLYLSLINQKGEIECQKTLNLVEQVRNDKTVSVNYHEKLVHKEGSRDAARKNWQTIGNIKELKEGYLSAVVHEIASLMVKHNAIVVMEDLNFGFKRGRFAVERQIYQKFENMLIEKLNYLVFKDRKVTEPGGVLNAYQLANKSAKVTDVYKQCGWLFYIPAAYTSKIDPRTGFANLFITKGLTNVEKKKEFFGKFDSIRYDATESCFVFSFDYAKICDNADYKKKWDVYTRGTRLVYNKTERKNVSVNPTEELQCVFDEFGIKWNTGEDLIESISLIPAEKSNAKFFDVLLRMFNATLQMRNSVPNTDTDYLVSPVKAEDGSFFDSREEFKKGGDARLPIDCDANGAYHIALKGLYLLLNDFNRDNKGVIQNISNKDWFKFVQEKVYKDGGGGGRSSDDEATADSQHAAPPKKKRKVGGGGKRPAATKKAGQAKKKK

SEQ ID NO: 70 - protein, 1354 aa, synthetic construct
MPAAKRVKLDGGGGARIIDEFCGQMNGYSRSITLRNRLVPIGKTEENLKQFLEKDLERATAYPDIKNLIDAIHRNVIEDTLSKVALNWNEIFNILATYQNEKDKKKKAAIKKDLEKLQSGARKKIVEAFKKNPDFEKLFKEGLFKELLPELIKSAPVDEIAVKTKALECFNRFSTYFTGFHRNRKNMYSEEAKSTAISYRIVNENFPKFFANIKLFNYLKEHFPRIIIDTEESLKDYLKGKKLDSVFSIDGFNSVLAQSGIDFYNTVIGGISGEAGTKKTQGLNEKINLARQQLSKEEKNKLRGKMVVLFKQILSDRETSSFIPVGFANKEEVYSTVKEFNNSIAEKAVSKVRDLFLHREEFTLNEIFVPAKSLTDFSQAIFGSWSILSEGLFLLEKDSMKKALSESQEEKINKEIAKKDCSFTELQLAYERYCTEHNLPVEKFCKDYFDIVDYRGNGAKSEKTKVSILSEILETFLQLDFDHIQDLQQEKNAAIPIKAYLDEVQNLYHHLKLVDYRGEEQKDSTFYSKHDEILTDLSQIVPLYNKVRNFVTKKLGESKKIKLNFDCPTLANGWDENQESSNDAIILRKDGKYYLGIYNPNNKPKFAKKDSIVGDCYEKMAYKQIALPMGLGAFVRKCFGTAQKYGWGCPENCLNSEGKIIIKDEEAKGNLEAIIDCYKDFLNKYEKDGFKYKDYNFSFLDSASYEKLSDFFNDVKPQGYKLSFTSIPLSEIDKMIDEGKLFLFQIYNKDFAKKATGKKNLHTLYWENLFSVENLQDVVLKLNGEAELFWREASIKKDKVIVHKKGSILVNRTTTDGKSIPEAIYQEIYQLKNKMADSISDEAKRLLESGTVVCKVATHDIVKDKHFTENTYLFHCPITMNFKAKDRTNKEFNNHVLEVLNKNPDIKVIGLDRGERHLLYLSLINQKGEIECQKTLNLVEQVRNDKTVSVNYHEKLVHKEGSRDAARRNWQTIGNIKELKEGYLSAVVHEIASLMVKHNAIVVMEDLNFGFKRGRFAVERQIYQKFENMLIEKLNYLVFKDRKVTEPGGVLNAYQLANKSAKVTDVYKQCGWLFYIPAAYTSKIDPRTGFANLFITKGLTNVEKKKEFFGKFDSIRYDATESCFVFSFDYAKICDNADYKKKWDVYTRGTRLVYNKTERKNVSVNPTEELQCVFDEFGIKWNTGEDLIESISLIPAEKSNAKFFDVLLRMFNATLQMRNSVPNTDTDYLVSPVKAEDGSFFDSREEFKKGGDARLPIDCDANGAYHIALKGLYLLLNDFNRDNKGVIQNISNKDWFKFVQEKVYKDGGGGGRSSDDEATADSQHAAPPKKKRKVGGGGKRPAATKKAGQAKKKK

SEQ ID NO: 71 - protein, 1354 aa, synthetic construct
MPAAKRVKLDGGGGARIIDEFCGQMNGYSRSITLRNRLVPIGKTEENLKQFLEKDLERATAYPDIKNLIDAIHRNVIEDTLSKVALNWNEIFNILATYQNEKDKKKKAAIKKDLEKLQSGARKKIVEAFKKNPDFEKLFKEGLFKELLPELIKSAPVDEIAVKTKALECFNRFSTYFTGFHRNRKNMYSEEAKSTAISYRIVNENFPKFFANIKLFNYLKEHFPRIIIDTEESLKDYLKGKKLDSVFSIDGFNSVLAQSGIDFYNTVIGGISGEAGTKKTQGLNEKINLARQQLSKEEKNKLRGKMVVLFKQILSDRETSSFIPVGFANKEEVYSTVKEFNNSIAEKAVSKVRDLFLHREEFTLNEIFVPAKSLTDFSQAIFGSWSILSEGLFLLEKDSMKKALSESQEEKINKEIAKKDCSFTELQLAYERYCTEHNLPVEKFCKDYFDIVDYRGNGAKSEKTKVSILSEILETFLQLDFDHIQDLQQEKNAAIPIKAYLDEVQNLYHHLKLVDYRGEEQKDSTFYSKHDEILTDLSQIVPLYNKVRNFVTKKLGESKKIKLNFDCPTLANGWDENQESSNDAIILRKDGKYYLGIYNPNNKPKFAKKDSIVGDCYEKMAYKQIALPMGLGAFVRKCFGTAQKYGWGCPENCLNSEGKIIIKDEEAKGNLEAIIDCYKDFLNKYEKDGFKYKDYNFSFLDSASYEKLSDFFNDVKPQGYKLSFTSIPLSEIDKMIDEGKLFLFQIYNKDFAKKATGKKNLHTLYWENLFSVENLQDVVLKLNGEAELFWREASIKKDKVIVHKKGSILVNRTTTDGKSIPEAIYQEIYQLKNKMADSISDEAKRLLESGTVVCKVATHDIVKDRHFTENTYLFHCPITMNFKAKDRTNKEFNNHVLEVLNKNPDIKVIGLDRGERHLLYLSLINQKGEIECQKTLNLVEQVRNDKTVSVNYHEKLVHKEGSRDAARKNWQTIGNIKELKEGYLSAVVHEIASLMVKHNAIVVMEDLNFGFKRGRFAVERQIYQKFENMLIEKLNYLVFKDRKVTEPGGVLNAYQLANKSAKVTDVYKQCGWLFYIPAAYTSKIDPRTGFANLFITKGLTNVEKKKEFFGKFDSIRYDATESCFVFSFDYAKICDNADYKKKWDVYTRGTRLVYNKTERKNVSVNPTEELQCVFDEFGIKWNTGEDLIESISLIPAEKSNAKFFDVLLRMFNATLQMRNSVPNTDTDYLVSPVKAEDGSFFDSREEFKKGGDARLPIDCDANGAYHIALKGLYLLLNDFNRDNKGVIQNISNKDWFKFVQEKVYKDGGGGGRSSDDEATADSQHAAPPKKKRKVGGGGKRPAATKKAGQAKKKK

SEQ ID NO: 72 - protein, 1354 aa, synthetic construct
MPAAKRVKLDGGGGARIIDEFCGQMNGYSRSITLRNRLVPIGKTEENLKQFLEKDLERATAYPDIKNLIDAIHRNVIEDTLSKVALNWNEIFNILATYQNEKDKKKKAAIKKDLEKLQSGARKKIVEAFKKNPDFEKLFKEGLFKELLPELIKSAPVDEIAVKTKALECFNRFSTYFTGFHRNRKNMYSEEAKSTAISYRIVNENFPKFFANIKLFNYLKEHFPRIIIDTEESLKDYLKGKKLDSVFSIDGFNSVLAQSGIDFYNTVIGGISGEAGTKKTQGLNEKINLARQQLSKEEKNKLRGKMVVLFKQILSDRETSSFIPVGFANKEEVYSTVKEFNNSIAEKAVSKVRDLFLHREEFTLNEIFVPAKSLTDFSQAIFGSWSILSEGLFLLEKDSMKKALSESQEEKINKEIAKKDCSFTELQLAYERYCTEHNLPVEKFCKDYFDIVDYRGNGAKSEKTKVSILSEILETFLQLDFDHIQDLQQEKNAAIPIKAYLDEVQNLYHHLKLVDYRGEEQKDSTFYSKHDEILTDLSQIVPLYNKVRNFVTKKLGESKKIKLNFDCPTLANGWDENQESSNDAIILRKDGKYYLGIYNPNNKPKFAKKDSIVGDCYEKMAYKQIALPMGLGAFVRKCFGTAQKYGWGCPENCLNSEGKIIIKDEEAKGNLEAIIDCYKDFLNKYEKDGFKYKDYNFSFLDSASYEKLSDFFNDVKPQGYKLSFTSIPLSEIDKMIDEGKLFLFQIYNKDFAKKATGRKNLHTLYWENLFSVENLQDVVLKLNGEAELFWREASIKKDKVIVHKKGSILVNRTTTDGKSIPEAIYQEIYQLKNKMADSISDEAKRLLESGTVVCKVATHDIVKDKHFTENTYLFHCPITMNFKAKDRTNKEFNNHVLEVLNKNPDIKVIGLDRGERHLLYLSLINQKGEIECQKTLNLVEQVRNDKTVSVNYHEKLVHKEGSRDAARKNWQTIGNIKELKEGYLSAVVHEIASLMVKHNAIVVMEDLNFGFKRGRFAVERQIYQKFENMLIEKLNYLVFKDRKVTEPGGVLNAYQLANKSAKVTDVYKQCGWLFYIPAAYTSKIDPRTGFANLFITKGLTNVEKKKEFFGKFDSIRYDATESCFVFSFDYAKICDNADYKKKWDVYTRGTRLVYNKTERKNVSVNPTEELQCVFDEFGIKWNTGEDLIESISLIPAEKSNAKFFDVLLRMFNATLQMRNSVPNTDTDYLVSPVKAEDGSFFDSREEFKKGGDARLPIDCDANGAYHIALKGLYLLLNDFNRDNKGVIQNISNKDWFKFVQEKVYKDGGGGGRSSDDEATADSQHAAPPKKKRKVGGGGKRPAATKKAGQAKKKK

SEQ ID NO: 73 - protein, 1354 aa, synthetic construct
MPAAKRVKLDGGGGARIIDEFCGQMNGYSRSITLRNRLVPIGKTEENLKQFLEKDLERATAYPDIKNLIDAIHRNVIEDTLSKVALNWNEIFNILATYQNEKDKKKKAAIKKDLEKLQSGARKKIVEAFKKNPDFEKLFKEGLFKELLPELIKSAPVDEIAVKTKALECFNRFSTYFTGFHRNRKNMYSEEAKSTAISYRIVNENFPKFFANIKLFNYLKEHFPRIIIDTEESLKDYLKGKKLDSVFSIDGFNSVLAQSGIDFYNTVIGGISGEAGTKKTQGLNEKINLARQQLSKEEKNKLRGKMVVLFRQILSDRETSSFIPVGFANKEEVYSTVKEFNNSIAEKAVSKVRDLFLHREEFTLNEIFVPAKSLTDFSQAIFGSWSILSEGLFLLEKDSMKKALSESQEEKINKEIAKKDCSFTELQLAYERYCTEHNLPVEKFCKDYFDIVDYRGNGAKSEKTKVSILSEILETFLQLDFDHIQDLQQEKNAAIPIKAYLDEVQNLYHHLKLVDYRGEEQKDSTFYSKHDEILTDLSQIVPLYNKVRNFVTKKLGESKKIKLNFDCPTLANGWDENQESSNDAIILRKDGKYYLGIYNPNNKPKFAKKDSIVGDCYEKMAYKQIALPMGLGAFVRKCFGTAQKYGWGCPENCLNSEGKIIIKDEEAKGNLEAIIDCYKDFLNKYEKDGFKYKDYNFSFLDSASYEKLSDFFNDVKPQGYKLSFTSIPLSEIDKMIDEGKLFLFQIYNKDFAKKATGKKNLHTLYWENLFSVENLQDVVLKLNGEAELFWREASIKKDKVIVHKKGSILVNRTTTDGKSIPEAIYQEIYQLKNKMADSISDEAKRLLESGTVVCKVATHDIVKDKHFTENTYLFHCPITMNFKAKDRTNKEFNNHVLEVLNKNPDIKVIGLDRGERHLLYLSLINQKGEIECQKTLNLVEQVRNDKTVSVNYHEKLVHKEGSRDAARKNWQTIGNIKELKEGYLSAVVHEIASLMVKHNAIVVMEDLNFGFKRGRFAVERQIYQKFENMLIEKLNYLVFKDRKVTEPGGVLNAYQLANKSAKVTDVYKQCGWLFYIPAAYTSKIDPRTGFANLFITKGLTNVEKKKEFFGKFDSIRYDATESCFVFSFDYAKICDNADYKKKWDVYTRGTRLVYNKTERKNVSVNPTEELQCVFDEFGIKWNTGEDLIESISLIPAEKSNAKFFDVLLRMFNATLQMRNSVPNTDTDYLVSPVKAEDGSFFDSREEFKKGGDARLPIDCDANGAYHIALKGLYLLLNDFNRDNKGVIQNISNKDWFKFVQEKVYKDGGGGGRSSDDEATADSQHAAPPKKKRKVGGGGKRPAATKKAGQAKKKK

SEQ ID NO: 74 - protein, 1354 aa, synthetic construct
MPAAKRVKLDGGGGARIIDEFCGQMNGYSRSITLRNRLVPIGKTEENLKQFLEKDLERATAYPDIKNLIDAIHRNVIEDTLSKVALNWNEIFNILATYQNEKDKKKKAAIKKDLEKLQSGARKKIVEAFKKNPDFEKLFKEGLFKELLPELIKSAPVDEIAVKTKALECFNRFSTYFTGFHRNRKNMYSEEAKSTAISYRIVNENFPKFFANIKLFNYLKEHFPRIIIDTEESLKDYLKGKKLDSVFSIDGFNSVLAQSGIDFYNTVIGGISGEAGTKKTQGLNEKINLARQQLSKEEKNKLRGRMVVLFKQILSDRETSSFIPVGFANKEEVYSTVKEFNNSIAEKAVSKVRDLFLHREEFTLNEIFVPAKSLTDFSQAIFGSWSILSEGLFLLEKDSMKKALSESQEEKINKEIAKKDCSFTELQLAYERYCTEHNLPVEKFCKDYFDIVDYRGNGAKSEKTKVSILSEILETFLQLDFDHIQDLQQEKNAAIPIKAYLDEVQNLYHHLKLVDYRGEEQKDSTFYSKHDEILTDLSQIVPLYNKVRNFVTKKLGESKKIKLNFDCPTLANGWDENQESSNDAIILRKDGKYYLGIYNPNNKPKFAKKDSIVGDCYEKMAYKQIALPMGLGAFVRKCFGTAQKYGWGCPENCLNSEGKIIIKDEEAKGNLEAIIDCYKDFLNKYEKDGFKYKDYNFSFLDSASYEKLSDFFNDVKPQGYKLSFTSIPLSEIDKMIDEGKLFLFQIYNKDFAKKATGKKNLHTLYWENLFSVENLQDVVLKLNGEAELFWREASIKKDKVIVHKKGSILVNRTTTDGKSIPEAIYQEIYQLKNKMADSISDEAKRLLESGTVVCKVATHDIVKDKHFTENTYLFHCPITMNFKAKDRTNKEFNNHVLEVLNKNPDIKVIGLDRGERHLLYLSLINQKGEIECQKTLNLVEQVRNDKTVSVNYHEKLVHKEGSRDAARKNWQTIGNIKELKEGYLSAVVHEIASLMVKHNAIVVMEDLNFGFKRGRFAVERQIYQKFENMLIEKLNYLVFKDRKVTEPGGVLNAYQLANKSAKVTDVYKQCGWLFYIPAAYTSKIDPRTGFANLFITKGLTNVEKKKEFFGKFDSIRYDATESCFVFSFDYAKICDNADYKKKWDVYTRGTRLVYNKTERKNVSVNPTEELQCVFDEFGIKWNTGEDLIESISLIPAEKSNAKFFDVLLRMFNATLQMRNSVPNTDTDYLVSPVKAEDGSFFDSREEFKKGGDARLPIDCDANGAYHIALKGLYLLLNDFNRDNKGVIQNISNKDWFKFVQEKVYKDGGGGGRSSDDEATADSQHAAPPKKKRKVGGGGKRPAATKKAGQAKKKK

SEQ ID NO: 75 - protein, 1354 aa, synthetic construct
MPAAKRVKLDGGGGARIIDEFCGQMNGYSRSITLRNRLVPIGKTEENLKQFLEKDLERATAYPDIKNLIDAIHRNVIEDTLSKVALNWNEIFNILATYQNEKDKKKKAAIKKDLEKLQSGARKKIVEAFKKNPDFEKLFKEGLFKELLPELIKSAPVDEIAVKTKALECFNRFSTYFTGFHRNRKNMYSEEAKSTAISYRIVNENFPKFFANIKLFNYLKEHFPRIIIDTEESLKDYLKGKKLDSVFSIDGFNSVLAQSGIDFYNTVIGGISGEAGTKKTQGLNEKINLARQQLSKEEKNKLRGKMVVLFKQILSDRETSSFIPVGFANKEEVYSTVKEFNNSIAEKAVSKVRDLFLHREEFTLNEIFVPAKSLTDFSQAIFGSWSILSEGLFLLEKDSMKKALSESQEEKINKEIAKKDCSFTELQLAYERYCTEHNLPVEKFCKDYFDIVDYRGNGAKSEKTKVSILSEILETFLQLDFDHIQDLQQEKNAAIPIKAYLDEVQNLYHHLKLVDYRGEEQKDSTFYSKHDEILTDLSQIVPLYNKVRNFVTKKLGESKKIKLNFDCPTLANGWDENQESSNDAIILRKDGKYYLGIYNPNNKPKFAKKDSIVGDCYEKMAYKQIALPMGLGAFVRKCFGTAQKYGWGCPENCLNSEGKIIIKDEEAKGNLEAIIDCYKDFLNKYEKDGFKYKDYNFSFLDSASYEKLSDFFNDVKPQGYKLSFTSIPLSEIDKMIDEGKLFLFQIYNKDFAKKATGKKNLHTLYWENLFSVENLQDVVLKLNGEAELFWREASIKKDKVIVHKKGSILVNRTTTDGKSIPEAIYQEIYQLKNKMADSISDEAKRLLESGTVVCKVATHDIVKDKRFTENTYLFHCPITMNFKAKDRTNKEFNNHVLEVLNKNPDIKVIGLDRGERHLLYLSLINQKGEIECQKTLNLVEQVRNDKTVSVNYHEKLVHKEGSRDAARKNWQTIGNIKELKEGYLSAVVHEIASLMVKHNAIVVMEDLNFGFKRGRFAVERQIYQKFENMLIEKLNYLVFKDRKVTEPGGVLNAYQLANKSAKVTDVYKQCGWLFYIPAAYTSKIDPRTGFANLFITKGLTNVEKKKEFFGKFDSIRYDATESCFVFSFDYAKICDNADYKKKWDVYTRGTRLVYNKTERKNVSVNPTEELQCVFDEFGIKWNTGEDLIESISLIPAEKSNAKFFDVLLRMFNATLQMRNSVPNTDTDYLVSPVKAEDGSFFDSREEFKKGGDARLPIDCDANGAYHIALKGLYLLLNDFNRDNKGVIQNISNKDWFKFVQEKVYKDGGGGGRSSDDEATADSQHAAPPKKKRKVGGGGKRPAATKKAGQAKKKK

SEQ ID NO: 76 - protein, 1354 aa, synthetic construct
MPAAKRVKLDGGGGARIIDEFCGQMNGYSRSITLRNRLVPIGKTEENLKQFLEKDLERATAYPDIKNLIDAIHRNVIEDTLSKVALNWNEIFNILATYQNEKDKKKKAAIKKDLEKLQSGARKKIVEAFKKNPDFEKLFKEGLFKELLPELIKSAPVDEIAVKTKALECFNRFSTYFTGFHRNRKNMYSEEAKSTAISYRIVNENFPKFFANIKLFNYLKEHFPRIIIDTEESLKDYLKGKKLDSVFSIDGFNSVLAQSGIDFYNTVIGGISGEAGTKKTQGLNEKINLARQQLSKEEKNKLRGKMVVLFKQILSDRETSSFIPVGFANKEEVYSTVKEFNNSIAEKAVSKVRDLFLHREEFTLNEIFVPAKSLTDFSQAIFGSWSILSEGLFLLEKDSMKKALSESQEEKINKEIAKKDCSFTELQLAYERYCTEHNLPVEKFCKDYFDIVDYRGNGAKSEKTKVSILSEILETFLQLDFDHIQDLQQEKNAAIPIKAYLDEVQNLYHHLKLVDYRGEEQKDSTFYSKHDEILTDLSQIVPLYNKVRNFVTKKLGESKKIKLNFDCPTLANGWDENQESSNDAIILRKDGKYYLGIYNPNNKPKFAKKDSIVGDCYEKMAYKQIALPMGLGAFVRKCFGTAQKYGWGCPENCLNSEGKIIIKDEEAKGNLEAIIDCYKDFLNKYEKDGFKYKDYNFSFLDSASYEKLSDFFNDVKPQGYKLSFTSIPLSEIDKMIDEGKLFLFQIYNKDFAKKATGKKNLHTLYWENLFSVENLQDVVLKLNGEAELFWREASIKKDKVIVHKKGSILVNRTTTDGKSIPEAIYQEIYQLKNKMADSISDEAKRLLESGTVVCKVATHDIVKDKHRTENTYLFHCPITMNFKAKDRTNKEFNNHVLEVLNKNPDIKVIGLDRGERHLLYLSLINQKGEIECQKTLNLVEQVRNDKTVSVNYHEKLVHKEGSRDAARKNWQTIGNIKELKEGYLSAVVHEIASLMVKHNAIVVMEDLNFGFKRGRFAVERQIYQKFENMLIEKLNYLVFKDRKVTEPGGVLNAYQLANKSAKVTDVYKQCGWLFYIPAAYTSKIDPRTGFANLFITKGLTNVEKKKEFFGKFDSIRYDATESCFVFSFDYAKICDNADYKKKWDVYTRGTRLVYNKTERKNVSVNPTEELQCVFDEFGIKWNTGEDLIESISLIPAEKSNAKFFDVLLRMFNATLQMRNSVPNTDTDYLVSPVKAEDGSFFDSREEFKKGGDARLPIDCDANGAYHIALKGLYLLLNDFNRDNKGVIQNISNKDWFKFVQEKVYKDGGGGGRSSDDEATADSQHAAPPKKKRKVGGGGKRPAATKKAGQAKKKK

SEQ ID NO: 77 - protein, 1354 aa, synthetic construct
MPAAKRVKLDGGGGARIIDEFCGQMNGYSRSITLRNRLVPIGKTEENLKQFLEKDLERATAYPDIKNLIDAIHRNVIEDTLSKVALNWNEIFNILATYQNEKDKKKKAAIKKDLEKLQSGARKKIVEAFKKNPDFEKLFKEGLFKELLPELIKSAPVDEIAVKTKALECFNRFSTYFTGFHRNRKNMYSEEAKSTAISYRIVNENFPKFFANIKLFNYLKEHFPRIIIDTEESLKDYLKGKKLDSVFSIDGFNSVLAQSGIDFYNTVIGGISGEAGTKKTQGLNEKINLARQQLSKEEKNKLRGKMVVLRKQILSDRETSSFIPVGFANKEEVYSTVKEFNNSIAEKAVSKVRDLFLHREEFTLNEIFVPAKSLTDFSQAIFGSWSILSEGLFLLEKDSMKKALSESQEEKINKEIAKKDCSFTELQLAYERYCTEHNLPVEKFCKDYFDIVDYRGNGAKSEKTKVSILSEILETFLQLDFDHIQDLQQEKNAAIPIKAYLDEVQNLYHHLKLVDYRGEEQKDSTFYSKHDEILTDLSQIVPLYNKVRNFVTKKLGESKKIKLNFDCPTLANGWDENQESSNDAIILRKDGKYYLGIYNPNNKPKFAKKDSIVGDCYEKMAYKQIALPMGLGAFVRKCFGTAQKYGWGCPENCLNSEGKIIIKDEEAKGNLEAIIDCYKDFLNKYEKDGFKYKDYNFSFLDSASYEKLSDFFNDVKPQGYKLSFTSIPLSEIDKMIDEGKLFLFQIYNKDFAKKATGKKNLHTLYWENLFSVENLQDVVLKLNGEAELFWREASIKKDKVIVHKKGSILVNRTTTDGKSIPEAIYQEIYQLKNKMADSISDEAKRLLESGTVVCKVATHDIVKDKHFTENTYLFHCPITMNFKAKDRTNKEFNNHVLEVLNKNPDIKVIGLDRGERHLLYLSLINQKGEIECQKTLNLVEQVRNDKTVSVNYHEKLVHKEGSRDAARKNWQTIGNIKELKEGYLSAVVHEIASLMVKHNAIVVMEDLNFGFKRGRFAVERQIYQKFENMLIEKLNYLVFKDRKVTEPGGVLNAYQLANKSAKVTDVYKQCGWLFYIPAAYTSKIDPRTGFANLFITKGLTNVEKKKEFFGKFDSIRYDATESCFVFSFDYAKICDNADYKKKWDVYTRGTRLVYNKTERKNVSVNPTEELQCVFDEFGIKWNTGEDLIESISLIPAEKSNAKFFDVLLRMFNATLQMRNSVPNTDTDYLVSPVKAEDGSFFDSREEFKKGGDARLPIDCDANGAYHIALKGLYLLLNDFNRDNKGVIQNISNKDWFKFVQEKVYKDGGGGGRSSDDEATADSQHAAPPKKKRKVGGGGKRPAATKKAGQAKKKK

SEQ ID NO: 78 - protein, 1354 aa, synthetic construct
MPAAKRVKLDGGGGARIIDEFCGQMNGYSRSITLRNRLVPIGKTEENLKQFLEKDLERATAYPDIKNLIDAIHRNVIEDTLSKVALNWNEIFNILATYQNEKDKKKKAAIKKDLEKLQSGARKKIVEAFKKNPDFEKLFKEGLFKELLPELIKSAPVDEIAVKTKALECFNRFSTYFTGFHRNRKNMYSEEAKSTAISYRIVNENFPKFFANIKLFNYLKEHFPRIIIDTEESLKDYLKGKKLDSVFSIDGFNSVLAQSGIDFYNTVIGGISGEAGTKKTQGLNEKINLARQQLSKEEKNKLRGKMVVLFKQILSDRETSSFIPVGFANKEEVYSTVKEFNNSIAEKAVSKVRDLFLHREEFTLNEIFVPAKSLTDFSQAIFGSWSILSEGLFLLEKDSMKKALSESQEEKINKEIAKKDCSFTELQLAYERYCTEHNLPVEKFCKDYFDIVDYRGNGAKSEKTKVSILSEILETFLQLDFDHIQDLQQEKNAAIPIKAYLDEVQNLYHHLKLVDYRGEEQKDSTFYSKHDEILTDLSQIVPLYNKVRNFVTKKLGESKKIKLNFDCPTLANGWDENQESSNDAIILRKDGKYYLGIYNPNNKPKFAKKDSIVGDCYEKMAYKQIALPMGLGAFVRKCFGTAQKYGWGCPENCLNSEGKIIIKDEEAKGNLEAIIDCYKDFLNKYEKDGFKYKDYNFSFLDSASYEKLSDFFNDVKPQGYKLSFTSIPLSEIDKMIDEGKLFLFQIYNKDFAKKATGKKNLHTLYWENLFSVENLQDVVLKLNGEAELFWREASIKKDKVIVHKKGSILVNRTTTDGKSIPEAIYQEIYQLKNKMADSISDEAKRLLESGTVVCKVATHDIVKDKHFTENTYLFHCPITMNFKAKDRTNKEFNNHVLEVLNKNPDIKVIGLDRGERHLLYLSLINQKGEIECQKTLNLVEQVRNDKTVSVNYHEKLVHKEGSRDAARKNWQTIGNIKELKEGYLSAVVHEIASLMVKHNAIVVMEDLNFGFKRGRFAVERQIYQKFENMLIRKLNYLVFKDRKVTEPGGVLNAYQLANKSAKVTDVYKQCGWLFYIPAAYTSKIDPRTGFANLFITKGLTNVEKKKEFFGKFDSIRYDATESCFVFSFDYAKICDNADYKKKWDVYTRGTRLVYNKTERKNVSVNPTEELQCVFDEFGIKWNTGEDLIESISLIPAEKSNAKFFDVLLRMFNATLQMRNSVPNTDTDYLVSPVKAEDGSFFDSREEFKKGGDARLPIDCDANGAYHIALKGLYLLLNDFNRDNKGVIQNISNKDWFKFVQEKVYKDGGGGGRSSDDEATADSQHAAPPKKKRKVGGGGKRPAATKKAGQAKKKK

SEQ ID NO: 79 - protein, 1354 aa, synthetic construct
MPAAKRVKLDGGGGARIIDEFCGQMNGYSRSITLRNRLVPIGKTEENLKQFLEKDLERATAYPDIKNLIDAIHRNVIEDTLSKVALNWNEIFNILATYQNEKDKKKKAAIKKDLEKLQSGARKKIVEAFKKNPDFEKLFKEGLFKELLPELIKSAPVDEIAVKTKALECFNRFSTYFTGFHRNRKNMYSEEAKSTAISYRIVNENFPKFFANIKLFNYLKEHFPRIIIDTEESLKDYLKGKKLDSVFSIDGFNSVLAQSGIDFYNTVIGGISGEAGTKKTQGLNEKINLARQQLSKEEKNKLRGKMVVLFKQILSDRETSSFIPVGFANKEEVYSTVKEFNNSIAEKAVSKVRDLFLHREEFTLNEIFVPAKSLTDFSQAIFGSWSILSRGLFLLEKDSMKKALSESQEEKINKEIAKKDCSFTELQLAYERYCTEHNLPVEKFCKDYFDIVDYRGNGAKSEKTKVSILSEILETFLQLDFDHIQDLQQEKNAAIPIKAYLDEVQNLYHHLKLVDYRGEEQKDSTFYSKHDEILTDLSQIVPLYNKVRNFVTKKLGESKKIKLNFDCPTLANGWDENQESSNDAIILRKDGKYYLGIYNPNNKPKFAKKDSIVGDCYEKMAYKQIALPMGLGAFVRKCFGTAQKYGWGCPENCLNSEGKIIIKDEEAKGNLEAIIDCYKDFLNKYEKDGFKYKDYNFSFLDSASYEKLSDFFNDVKPQGYKLSFTSIPLSEIDKMIDEGKLFLFQIYNKDFAKKATGKKNLHTLYWENLFSVENLQDVVLKLNGEAELFWREASIKKDKVIVHKKGSILVNRTTTDGKSIPEAIYQEIYQLKNKMADSISDEAKRLLESGTVVCKVATHDIVKDKHFTENTYLFHCPITMNFKAKDRTNKEFNNHVLEVLNKNPDIKVIGLDRGERHLLYLSLINQKGEIECQKTLNLVEQVRNDKTVSVNYHEKLVHKEGSRDAARKNWQTIGNIKELKEGYLSAVVHEIASLMVKHNAIVVMEDLNFGFKRGRFAVERQIYQKFENMLIEKLNYLVFKDRKVTEPGGVLNAYQLANKSAKVTDVYKQCGWLFYIPAAYTSKIDPRTGFANLFITKGLTNVEKKKEFFGKFDSIRYDATESCFVFSFDYAKICDNADYKKKWDVYTRGTRLVYNKTERKNVSVNPTEELQCVFDEFGIKWNTGEDLIESISLIPAEKSNAKFFDVLLRMFNATLQMRNSVPNTDTDYLVSPVKAEDGSFFDSREEFKKGGDARLPIDCDANGAYHIALKGLYLLLNDFNRDNKGVIQNISNKDWFKFVQEKVYKDGGGGGRSSDDEATADSQHAAPPKKKRKVGGGGKRPAATKKAGQAKKKK

SEQ ID NO: 80 - protein, 1354 aa, synthetic construct
MPAAKRVKLDGGGGARIIDEFCGQMNGYSRSITLRNRLVPIGKTEENLKQFLEKDLERATAYPDIKNLIDAIHRNVIEDTLSKVALNWNEIFNILATYQNEKDKKKKAAIKKDLEKLQSGARKKIVEAFKKNPDFEKLFKEGLFKELLPELIKSAPVDEIAVKTKALECFNRFSTYFTGFHRNRKNMYSEEAKSTAISYRIVNENFPKFFANIKLFNYLKEHFPRIIIDTEESLKDYLKGKKLDSVFSIDGFNSVLAQSGIDFYNTVIGGISGEAGTKKTQGLNEKINLARQQLSKEEKNKLRGKMVVLFKQILSDRETSSFIPVGFANKEEVYSTVKEFNNSIAEKAVSKVRDLFLHREEFTLNEIFVPAKSLTDFSQAIFGSWSILSEGLFLLEKDSMKKALSESQEEKINKEIAKKDCSFTELQLAYERYCTEHNLPVEKFCKDYFDIVDYRGNGAKSEKTKVSILSEILETFLQLDFDHIQDLQQEKNAAIPIKAYLDEVQNLYHHLKLVDYRGEEQKDSTFYSKHDEILTDLSQIVPLYNKVRNFVTKKLGESKKIKLNFDCPTLANGWDENQESSNDAIILRKDGKYYLGIYNPNNKPKFAKKDSIVGDCYEKMAYKQIALPMGLGAFVRKCFGTAQKYGWGCPENCLNSEGKIIIKDEEAKGNLEAIIDCYKDFLNKYEKDGFKYKDYNFSFLDSASYEKLSDFFNDVKPQGYKLSFTSIPLSEIDKMIDEGKLFLFQIYNKDFAKKATGKKNLHTLYWENLFSVENLQDVVLKLNGEAELFWREASIKKDKVIVHKKGSILVNRTTTDGKSIPEAIYQEIYQLKNKMADSISDEAKRLLESGTVVCKVATHDIVKRKHFTENTYLFHCPITMNFKAKDRTNKEFNNHVLEVLNKNPDIKVIGLDRGERHLLYLSLINQKGEIECQKTLNLVEQVRNDKTVSVNYHEKLVHKEGSRDAARKNWQTIGNIKELKEGYLSAVVHEIASLMVKHNAIVVMEDLNFGFKRGRFAVERQIYQKFENMLIEKLNYLVFKDRKVTEPGGVLNAYQLANKSAKVTDVYKQCGWLFYIPAAYTSKIDPRTGFANLFITKGLTNVEKKKEFFGKFDSIRYDATESCFVFSFDYAKICDNADYKKKWDVYTRGTRLVYNKTERKNVSVNPTEELQCVFDEFGIKWNTGEDLIESISLIPAEKSNAKFFDVLLRMFNATLQMRNSVPNTDTDYLVSPVKAEDGSFFDSREEFKKGGDARLPIDCDANGAYHIALKGLYLLLNDFNRDNKGVIQNISNKDWFKFVQEKVYKDGGGGGRSSDDEATADSQHAAPPKKKRKVGGGGKRPAATKKAGQAKKKK

SEQ ID NO: 81 - protein, 16 aa, synthetic construct
KRPAATKKAGQAKKKK

SEQ ID NO: 82 - protein, 23 aa, synthetic construct
RSSDDEATADSQHAAPPKKKRKV

SEQ ID NO: 83 - DNA, 22 bp, synthetic construct
  source 1..22: mol_type = other DNA
ctcatacacaactttcagcagc

SEQ ID NO: 84 - protein, 1309 aa, synthetic construct
MARIIDEFCGQMNGYSRSITLRNRLVPIGKTEENLKQFLEKDLERATAYPDIKNLIDAIHRNVIEDTLSKVALNWNEIFNILATYQNEKDKKKKAAIKKDLEKLQSGARKKIVEAFKKNPDFEKLFKEGLFKELLPELIKSAPVDEIAVKTKALECFNRFSTYFTGFHRNRKNMYSEEAKSTAISYRIVNENFPKFFANIKLFNYLKEHFPRIIIDTEESLKDYLKGKKLDSVFSIDGFNSVLAQSGIDFYNTVIGGISGEAGTKKTQGLNEKINLARQQLSKEEKNKLRGKMVVLFKQILSDRETSSFIPVGFANKEEVYSTVKEFNNSIAEKAVSKVRDLFLHREEFTLNEIFVPAKSLTDFSQAIFGSWSILSEGLFLLEKDSMKKALSESQEEKINKEIAKKDCSFTELQLAYERYCTEHNLPVEKFCKDYFDIVDYRGNGAKSEKTKVSILSEILETFLQLDFDHIQDLQQEKNAAIPIKAYLDEVQNLYHHLKLVDYRGEEQKDSTFYSKHDEILTDLSQIVPLYNKVRNFVTKKLGESKKIKLNFDCPTLANGWDENQESSNDAIILRKDGKYYLGIYNPNNKPKFAKKDSIVGDCYEKMAYKQIALPMGLGAFVRKCFGTAQKYGWGCPENCLNSEGKIIIKDEEAKGNLEAIIDCYKDFLNKYEKDGFKYKDYNFSFLDSASYEKLSDFFNDVKPQGYKLSFTSIPLSEIDKMIDEGKLFLFQIYNKDFAKKATGKKNLHTLYWENLFSVENLQDVVLKLNGEAELFWREASIKKDKVIVHKKGSILVNRTTTDGKSIPEAIYQEIYQLKNKMADSISDEAKRLLESGTVVCKVATHDIVKDKHFTENTYLFHCPITMNFKAKDRTNKEFNNHVLEVLNKNPDIKVIGLDRGERHLLYLSLINQKGEIECQKTLNLVEQVRNDKTVSVNYHEKLVHKEGSRDAARKNWQTIGNIKELKEGYLSAVVHEIASLMVKHNAIVVMEDLNFGFKRGRFAVERQIYQKFENMLIEKLNYLVFKDRKVTEPGGVLNAYQLANKSAKVTDVYKQCGWLFYIPAAYTSKIDPRTGFANLFITKGLTNVEKKKEFFGKFDSIRYDATESCFVFSFDYAKICDNADYKKKWDVYTRGTRLVYNKTERKNVSVNPTEELQCVFDEFGIKWNTGEDLIESISLIPAEKSNAKFFDVLLRMFNATLQMRNSVPNTDTDYLVSPVKAEDGSFFDSREEFKKGGDARLPIDCDANGAYHIALKGLYLLLNDFNRDNKGVIQNISNKDWFKFVQEKVYKDKRPAATKKAGQAKKKK

SEQ ID NO: 85 - protein, 1313 aa, synthetic construct
MARIIDEFCGQMNGYSRSITLRNRLVPIGKTEENLKQFLEKDLERATAYPDIKNLIDAIHRNVIEDTLSKVALNWNEIFNILATYQNEKDKKKKAAIKKDLEKLQSGARKKIVEAFKKNPDFEKLFKEGLFKELLPELIKSAPVDEIAVKTKALECFNRFSTYFTGFHRNRKNMYSEEAKSTAISYRIVNENFPKFFANIKLFNYLKEHFPRIIIDTEESLKDYLKGKKLDSVFSIDGFNSVLAQSGIDFYNTVIGGISGEAGTKKTQGLNEKINLARQQLSKEEKNKLRGKMVVLFKQILSDRETSSFIPVGFANKEEVYSTVKEFNNSIAEKAVSKVRDLFLHREEFTLNEIFVPAKSLTDFSQAIFGSWSILSEGLFLLEKDSMKKALSESQEEKINKEIAKKDCSFTELQLAYERYCTEHNLPVEKFCKDYFDIVDYRGNGAKSEKTKVSILSEILETFLQLDFDHIQDLQQEKNAAIPIKAYLDEVQNLYHHLKLVDYRGEEQKDSTFYSKHDEILTDLSQIVPLYNKVRNFVTKKLGESKKIKLNFDCPTLANGWDENQESSNDAIILRKDGKYYLGIYNPNNKPKFAKKDSIVGDCYEKMAYKQIALPMGLGAFVRKCFGTAQKYGWGCPENCLNSEGKIIIKDEEAKGNLEAIIDCYKDFLNKYEKDGFKYKDYNFSFLDSASYEKLSDFFNDVKPQGYKLSFTSIPLSEIDKMIDEGKLFLFQIYNKDFAKKATGKKNLHTLYWENLFSVENLQDVVLKLNGEAELFWREASIKKDKVIVHKKGSILVNRTTTDGKSIPEAIYQEIYQLKNKMADSISDEAKRLLESGTVVCKVATHDIVKDKHFTENTYLFHCPITMNFKAKDRTNKEFNNHVLEVLNKNPDIKVIGLDRGERHLLYLSLINQKGEIECQKTLNLVEQVRNDKTVSVNYHEKLVHKEGSRDAARKNWQTIGNIKELKEGYLSAVVHEIASLMVKHNAIVVMEDLNFGFKRGRFAVERQIYQKFENMLIEKLNYLVFKDRKVTEPGGVLNAYQLANKSAKVTDVYKQCGWLFYIPAAYTSKIDPRTGFANLFITKGLTNVEKKKEFFGKFDSIRYDATESCFVFSFDYAKICDNADYKKKWDVYTRGTRLVYNKTERKNVSVNPTEELQCVFDEFGIKWNTGEDLIESISLIPAEKSNAKFFDVLLRMFNATLQMRNSVPNTDTDYLVSPVKAEDGSFFDSREEFKKGGDARLPIDCDANGAYHIALKGLYLLLNDFNRDNKGVIQNISNKDWFKFVQEKVYKDGGGGKRPAATKKAGQAKKKK

SEQ ID NO: 86 - protein, 1306 aa, synthetic construct
MARIIDEFCGQMNGYSRSITLRNRLVPIGKTEENLKQFLEKDLERATAYPDIKNLIDAIHRNVIEDTLSKVALNWNEIFNILATYQNEKDKKKKAAIKKDLEKLQSGARKKIVEAFKKNPDFEKLFKEGLFKELLPELIKSAPVDEIAVKTKALECFNRFSTYFTGFHRNRKNMYSEEAKSTAISYRIVNENFPKFFANIKLFNYLKEHFPRIIIDTEESLKDYLKGKKLDSVFSIDGFNSVLAQSGIDFYNTVIGGISGEAGTKKTQGLNEKINLARQQLSKEEKNKLRGKMVVLFKQILSDRETSSFIPVGFANKEEVYSTVKEFNNSIAEKAVSKVRDLFLHREEFTLNEIFVPAKSLTDFSQAIFGSWSILSEGLFLLEKDSMKKALSESQEEKINKEIAKKDCSFTELQLAYERYCTEHNLPVEKFCKDYFDIVDYRGNGAKSEKTKVSILSEILETFLQLDFDHIQDLQQEKNAAIPIKAYLDEVQNLYHHLKLVDYRGEEQKDSTFYSKHDEILTDLSQIVPLYNKVRNFVTKKLGESKKIKLNFDCPTLANGWDENQESSNDAIILRKDGKYYLGIYNPNNKPKFAKKDSIVGDCYEKMAYKQIALPMGLGAFVRKCFGTAQKYGWGCPENCLNSEGKIIIKDEEAKGNLEAIIDCYKDFLNKYEKDGFKYKDYNFSFLDSASYEKLSDFFNDVKPQGYKLSFTSIPLSEIDKMIDEGKLFLFQIYNKDFAKKATGKKNLHTLYWENLFSVENLQDVVLKLNGEAELFWREASIKKDKVIVHKKGSILVNRTTTDGKSIPEAIYQEIYQLKNKMADSISDEAKRLLESGTVVCKVATHDIVKDKHFTENTYLFHCPITMNFKAKDRTNKEFNNHVLEVLNKNPDIKVIGLDRGERHLLYLSLINQKGEIECQKTLNLVEQVRNDKTVSVNYHEKLVHKEGSRDAARKNWQTIGNIKELKEGYLSAVVHEIASLMVKHNAIVVMEDLNFGFKRGRFAVERQIYQKFENMLIEKLNYLVFKDRKVTEPGGVLNAYQLANKSAKVTDVYKQCGWLFYIPAAYTSKIDPRTGFANLFITKGLTNVEKKKEFFGKFDSIRYDATESCFVFSFDYAKICDNADYKKKWDVYTRGTRLVYNKTERKNVSVNPTEELQCVFDEFGIKWNTGEDLIESISLIPAEKSNAKFFDVLLRMFNATLQMRNSVPNTDTDYLVSPVKAEDGSFFDSREEFKKGGDARLPIDCDANGAYHIALKGLYLLLNDFNRDNKGVIQNISNKDWFKFVQEKVYKDGGGGPAAKRVKLD

SEQ ID NO: 87 - protein, 1326 aa, synthetic construct
MARIIDEFCGQMNGYSRSITLRNRLVPIGKTEENLKQFLEKDLERATAYPDIKNLIDAIHRNVIEDTLSKVALNWNEIFNILATYQNEKDKKKKAAIKKDLEKLQSGARKKIVEAFKKNPDFEKLFKEGLFKELLPELIKSAPVDEIAVKTKALECFNRFSTYFTGFHRNRKNMYSEEAKSTAISYRIVNENFPKFFANIKLFNYLKEHFPRIIIDTEESLKDYLKGKKLDSVFSIDGFNSVLAQSGIDFYNTVIGGISGEAGTKKTQGLNEKINLARQQLSKEEKNKLRGKMVVLFKQILSDRETSSFIPVGFANKEEVYSTVKEFNNSIAEKAVSKVRDLFLHREEFTLNEIFVPAKSLTDFSQAIFGSWSILSEGLFLLEKDSMKKALSESQEEKINKEIAKKDCSFTELQLAYERYCTEHNLPVEKFCKDYFDIVDYRGNGAKSEKTKVSILSEILETFLQLDFDHIQDLQQEKNAAIPIKAYLDEVQNLYHHLKLVDYRGEEQKDSTFYSKHDEILTDLSQIVPLYNKVRNFVTKKLGESKKIKLNFDCPTLANGWDENQESSNDAIILRKDGKYYLGIYNPNNKPKFAKKDSIVGDCYEKMAYKQIALPMGLGAFVRKCFGTAQKYGWGCPENCLNSEGKIIIKDEEAKGNLEAIIDCYKDFLNKYEKDGFKYKDYNFSFLDSASYEKLSDFFNDVKPQGYKLSFTSIPLSEIDKMIDEGKLFLFQIYNKDFAKKATGKKNLHTLYWENLFSVENLQDVVLKLNGEAELFWREASIKKDKVIVHKKGSILVNRTTTDGKSIPEAIYQEIYQLKNKMADSISDEAKRLLESGTVVCKVATHDIVKDKHFTENTYLFHCPITMNFKAKDRTNKEFNNHVLEVLNKNPDIKVIGLDRGERHLLYLSLINQKGEIECQKTLNLVEQVRNDKTVSVNYHEKLVHKEGSRDAARKNWQTIGNIKELKEGYLSAVVHEIASLMVKHNAIVVMEDLNFGFKRGRFAVERQIYQKFENMLIEKLNYLVFKDRKVTEPGGVLNAYQLANKSAKVTDVYKQCGWLFYIPAAYTSKIDPRTGFANLFITKGLTNVEKKKEFFGKFDSIRYDATESCFVFSFDYAKICDNADYKKKWDVYTRGTRLVYNKTERKNVSVNPTEELQCVFDEFGIKWNTGEDLIESISLIPAEKSNAKFFDVLLRMFNATLQMRNSVPNTDTDYLVSPVKAEDGSFFDSREEFKKGGDARLPIDCDANGAYHIALKGLYLLLNDFNRDNKGVIQNISNKDWFKFVQEKVYKDGGGGKRPAATKKAGQAKKKKGGGGPAAKRVKLD

SEQ ID NO: 88 - protein, 1334 aa, synthetic construct
MARIIDEFCGQMNGYSRSITLRNRLVPIGKTEENLKQFLEKDLERATAYPDIKNLIDAIHRNVIEDTLSKVALNWNEIFNILATYQNEKDKKKKAAIKKDLEKLQSGARKKIVEAFKKNPDFEKLFKEGLFKELLPELIKSAPVDEIAVKTKALECFNRFSTYFTGFHRNRKNMYSEEAKSTAISYRIVNENFPKFFANIKLFNYLKEHFPRIIIDTEESLKDYLKGKKLDSVFSIDGFNSVLAQSGIDFYNTVIGGISGEAGTKKTQGLNEKINLARQQLSKEEKNKLRGKMVVLFKQILSDRETSSFIPVGFANKEEVYSTVKEFNNSIAEKAVSKVRDLFLHREEFTLNEIFVPAKSLTDFSQAIFGSWSILSEGLFLLEKDSMKKALSESQEEKINKEIAKKDCSFTELQLAYERYCTEHNLPVEKFCKDYFDIVDYRGNGAKSEKTKVSILSEILETFLQLDFDHIQDLQQEKNAAIPIKAYLDEVQNLYHHLKLVDYRGEEQKDSTFYSKHDEILTDLSQIVPLYNKVRNFVTKKLGESKKIKLNFDCPTLANGWDENQESSNDAIILRKDGKYYLGIYNPNNKPKFAKKDSIVGDCYEKMAYKQIALPMGLGAFVRKCFGTAQKYGWGCPENCLNSEGKIIIKDEEAKGNLEAIIDCYKDFLNKYEKDGFKYKDYNFSFLDSASYEKLSDFFNDVKPQGYKLSFTSIPLSEIDKMIDEGKLFLFQIYNKDFAKKATGKKNLHTLYWENLFSVENLQDVVLKLNGEAELFWREASIKKDKVIVHKKGSILVNRTTTDGKSIPEAIYQEIYQLKNKMADSISDEAKRLLESGTVVCKVATHDIVKDKHFTENTYLFHCPITMNFKAKDRTNKEFNNHVLEVLNKNPDIKVIGLDRGERHLLYLSLINQKGEIECQKTLNLVEQVRNDKTVSVNYHEKLVHKEGSRDAARKNWQTIGNIKELKEGYLSAVVHEIASLMVKHNAIVVMEDLNFGFKRGRFAVERQIYQKFENMLIEKLNYLVFKDRKVTEPGGVLNAYQLANKSAKVTDVYKQCGWLFYIPAAYTSKIDPRTGFANLFITKGLTNVEKKKEFFGKFDSIRYDATESCFVFSFDYAKICDNADYKKKWDVYTRGTRLVYNKTERKNVSVNPTEELQCVFDEFGIKWNTGEDLIESISLIPAEKSNAKFFDVLLRMFNATLQMRNSVPNTDTDYLVSPVKAEDGSFFDSREEFKKGGDARLPIDCDANGAYHIALKGLYLLLNDFNRDNKGVIQNISNKDWFKFVQEKVYKDGGGGPAAKRVKLDGGGGGRSSDDEATADSQHAAPPKKKRKV

SEQ ID NO: 89 - protein, 1339 aa, synthetic construct
MARIIDEFCGQMNGYSRSITLRNRLVPIGKTEENLKQFLEKDLERATAYPDIKNLIDAIHRNVIEDTLSKVALNWNEIFNILATYQNEKDKKKKAAIKKDLEKLQSGARKKIVEAFKKNPDFEKLFKEGLFKELLPELIKSAPVDEIAVKTKALECFNRFSTYFTGFHRNRKNMYSEEAKSTAISYRIVNENFPKFFANIKLFNYLKEHFPRIIIDTEESLKDYLKGKKLDSVFSIDGFNSVLAQSGIDFYNTVIGGISGEAGTKKTQGLNEKINLARQQLSKEEKNKLRGKMVVLFKQILSDRETSSFIPVGFANKEEVYSTVKEFNNSIAEKAVSKVRDLFLHREEFTLNEIFVPAKSLTDFSQAIFGSWSILSEGLFLLEKDSMKKALSESQEEKINKEIAKKDCSFTELQLAYERYCTEHNLPVEKFCKDYFDIVDYRGNGAKSEKTKVSILSEILETFLQLDFDHIQDLQQEKNAAIPIKAYLDEVQNLYHHLKLVDYRGEEQKDSTFYSKHDEILTDLSQIVPLYNKVRNFVTKKLGESKKIKLNFDCPTLANGWDENQESSNDAIILRKDGKYYLGIYNPNNKPKFAKKDSIVGDCYEKMAYKQIALPMGLGAFVRKCFGTAQKYGWGCPENCLNSEGKIIIKDEEAKGNLEAIIDCYKDFLNKYEKDGFKYKDYNFSFLDSASYEKLSDFFNDVKPQGYKLSFTSIPLSEIDKMIDEGKLFLFQIYNKDFAKKATGKKNLHTLYWENLFSVENLQDVVLKLNGEAELFWREASIKKDKVIVHKKGSILVNRTTTDGKSIPEAIYQEIYQLKNKMADSISDEAKRLLESGTVVCKVATHDIVKDKHFTENTYLFHCPITMNFKAKDRTNKEFNNHVLEVLNKNPDIKVIGLDRGERHLLYLSLINQKGEIECQKTLNLVEQVRNDKTVSVNYHEKLVHKEGSRDAARKNWQTIGNIKELKEGYLSAVVHEIASLMVKHNAIVVMEDLNFGFKRGRFAVERQIYQKFENMLIEKLNYLVFKDRKVTEPGGVLNAYQLANKSAKVTDVYKQCGWLFYIPAAYTSKIDPRTGFANLFITKGLTNVEKKKEFFGKFDSIRYDATESCFVFSFDYAKICDNADYKKKWDVYTRGTRLVYNKTERKNVSVNPTEELQCVFDEFGIKWNTGEDLIESISLIPAEKSNAKFFDVLLRMFNATLQMRNSVPNTDTDYLVSPVKAEDGSFFDSREEFKKGGDARLPIDCDANGAYHIALKGLYLLLNDFNRDNKGVIQNISNKDWFKFVQEKVYKDGGGGKRPAATKKAGQAKKKKGGGGPAAKRVKLDGGGGPAAKRVKLD

SEQ ID NO: 90 - protein, 1321 aa, synthetic construct
MARIIDEFCGQMNGYSRSITLRNRLVPIGKTEENLKQFLEKDLERATAYPDIKNLIDAIHRNVIEDTLSKVALNWNEIFNILATYQNEKDKKKKAAIKKDLEKLQSGARKKIVEAFKKNPDFEKLFKEGLFKELLPELIKSAPVDEIAVKTKALECFNRFSTYFTGFHRNRKNMYSEEAKSTAISYRIVNENFPKFFANIKLFNYLKEHFPRIIIDTEESLKDYLKGKKLDSVFSIDGFNSVLAQSGIDFYNTVIGGISGEAGTKKTQGLNEKINLARQQLSKEEKNKLRGKMVVLFKQILSDRETSSFIPVGFANKEEVYSTVKEFNNSIAEKAVSKVRDLFLHREEFTLNEIFVPAKSLTDFSQAIFGSWSILSEGLFLLEKDSMKKALSESQEEKINKEIAKKDCSFTELQLAYERYCTEHNLPVEKFCKDYFDIVDYRGNGAKSEKTKVSILSEILETFLQLDFDHIQDLQQEKNAAIPIKAYLDEVQNLYHHLKLVDYRGEEQKDSTFYSKHDEILTDLSQIVPLYNKVRNFVTKKLGESKKIKLNFDCPTLANGWDENQESSNDAIILRKDGKYYLGIYNPNNKPKFAKKDSIVGDCYEKMAYKQIALPMGLGAFVRKCFGTAQKYGWGCPENCLNSEGKIIIKDEEAKGNLEAIIDCYKDFLNKYEKDGFKYKDYNFSFLDSASYEKLSDFFNDVKPQGYKLSFTSIPLSEIDKMIDEGKLFLFQIYNKDFAKKATGKKNLHTLYWENLFSVENLQDVVLKLNGEAELFWREASIKKDKVIVHKKGSILVNRTTTDGKSIPEAIYQEIYQLKNKMADSISDEAKRLLESGTVVCKVATHDIVKDKHFTENTYLFHCPITMNFKAKDRTNKEFNNHVLEVLNKNPDIKVIGLDRGERHLLYLSLINQKGEIECQKTLNLVEQVRNDKTVSVNYHEKLVHKEGSRDAARKNWQTIGNIKELKEGYLSAVVHEIASLMVKHNAIVVMEDLNFGFKRGRFAVERQIYQKFENMLIEKLNYLVFKDRKVTEPGGVLNAYQLANKSAKVTDVYKQCGWLFYIPAAYTSKIDPRTGFANLFITKGLTNVEKKKEFFGKFDSIRYDATESCFVFSFDYAKICDNADYKKKWDVYTRGTRLVYNKTERKNVSVNPTEELQCVFDEFGIKWNTGEDLIESISLIPAEKSNAKFFDVLLRMFNATLQMRNSVPNTDTDYLVSPVKAEDGSFFDSREEFKKGGDARLPIDCDANGAYHIALKGLYLLLNDFNRDNKGVIQNISNKDWFKFVQEKVYKDGGGGGRSSDDEATADSQHAAPPKKKRKV

SEQ ID NO: 91 - protein, 1341 aa, synthetic construct
MARIIDEFCGQMNGYSRSITLRNRLVPIGKTEENLKQFLEKDLERATAYPDIKNLIDAIHRNVIEDTLSKVALNWNEIFNILATYQNEKDKKKKAAIKKDLEKLQSGARKKIVEAFKKNPDFEKLFKEGLFKELLPELIKSAPVDEIAVKTKALECFNRFSTYFTGFHRNRKNMYSEEAKSTAISYRIVNENFPKFFANIKLFNYLKEHFPRIIIDTEESLKDYLKGKKLDSVFSIDGFNSVLAQSGIDFYNTVIGGISGEAGTKKTQGLNEKINLARQQLSKEEKNKLRGKMVVLFKQILSDRETSSFIPVGFANKEEVYSTVKEFNNSIAEKAVSKVRDLFLHREEFTLNEIFVPAKSLTDFSQAIFGSWSILSEGLFLLEKDSMKKALSESQEEKINKEIAKKDCSFTELQLAYERYCTEHNLPVEKFCKDYFDIVDYRGNGAKSEKTKVSILSEILETFLQLDFDHIQDLQQEKNAAIPIKAYLDEVQNLYHHLKLVDYRGEEQKDSTFYSKHDEILTDLSQIVPLYNKVRNFVTKKLGESKKIKLNFDCPTLANGWDENQESSNDAIILRKDGKYYLGIYNPNNKPKFAKKDSIVGDCYEKMAYKQIALPMGLGAFVRKCFGTAQKYGWGCPENCLNSEGKIIIKDEEAKGNLEAIIDCYKDFLNKYEKDGFKYKDYNFSFLDSASYEKLSDFFNDVKPQGYKLSFTSIPLSEIDKMIDEGKLFLFQIYNKDFAKKATGKKNLHTLYWENLFSVENLQDVVLKLNGEAELFWREASIKKDKVIVHKKGSILVNRTTTDGKSIPEAIYQEIYQLKNKMADSISDEAKRLLESGTVVCKVATHDIVKDKHFTENTYLFHCPITMNFKAKDRTNKEFNNHVLEVLNKNPDIKVIGLDRGERHLLYLSLINQKGEIECQKTLNLVEQVRNDKTVSVNYHEKLVHKEGSRDAARKNWQTIGNIKELKEGYLSAVVHEIASLMVKHNAIVVMEDLNFGFKRGRFAVERQIYQKFENMLIEKLNYLVFKDRKVTEPGGVLNAYQLANKSAKVTDVYKQCGWLFYIPAAYTSKIDPRTGFANLFITKGLTNVEKKKEFFGKFDSIRYDATESCFVFSFDYAKICDNADYKKKWDVYTRGTRLVYNKTERKNVSVNPTEELQCVFDEFGIKWNTGEDLIESISLIPAEKSNAKFFDVLLRMFNATLQMRNSVPNTDTDYLVSPVKAEDGSFFDSREEFKKGGDARLPIDCDANGAYHIALKGLYLLLNDFNRDNKGVIQNISNKDWFKFVQEKVYKDGGGGGRSSDDEATADSQHAAPPKKKRKVGGGGKRPAATKKAGQAKKKK

SEQ ID NO: 92 - protein, 1341 aa, synthetic construct
MARIIDEFCGQMNGYSRSITLRNRLVPIGKTEENLKQFLEKDLERATAYPDIKNLIDAIHRNVIEDTLSKVALNWNEIFNILATYQNEKDKKKKAAIKKDLEKLQSGARKKIVEAFKKNPDFEKLFKEGLFKELLPELIKSAPVDEIAVKTKALECFNRFSTYFTGFHRNRKNMYSEEAKSTAISYRIVNENFPKFFANIKLFNYLKEHFPRIIIDTEESLKDYLKGKKLDSVFSIDGFNSVLAQSGIDFYNTVIGGISGEAGTKKTQGLNEKINLARQQLSKEEKNKLRGKMVVLFKQILSDRETSSFIPVGFANKEEVYSTVKEFNNSIAEKAVSKVRDLFLHREEFTLNEIFVPAKSLTDFSQAIFGSWSILSEGLFLLEKDSMKKALSESQEEKINKEIAKKDCSFTELQLAYERYCTEHNLPVEKFCKDYFDIVDYRGNGAKSEKTKVSILSEILETFLQLDFDHIQDLQQEKNAAIPIKAYLDEVQNLYHHLKLVDYRGEEQKDSTFYSKHDEILTDLSQIVPLYNKVRNFVTKKLGESKKIKLNFDCPTLANGWDENQESSNDAIILRKDGKYYLGIYNPNNKPKFAKKDSIVGDCYEKMAYKQIALPMGLGAFVRKCFGTAQKYGWGCPENCLNSEGKIIIKDEEAKGNLEAIIDCYKDFLNKYEKDGFKYKDYNFSFLDSASYEKLSDFFNDVKPQGYKLSFTSIPLSEIDKMIDEGKLFLFQIYNKDFAKKATGKKNLHTLYWENLFSVENLQDVVLKLNGEAELFWREASIKKDKVIVHKKGSILVNRTTTDGKSIPEAIYQEIYQLKNKMADSISDEAKRLLESGTVVCKVATHDIVKDKHFTENTYLFHCPITMNFKAKDRTNKEFNNHVLEVLNKNPDIKVIGLDRGERHLLYLSLINQKGEIECQKTLNLVEQVRNDKTVSVNYHEKLVHKEGSRDAARKNWQTIGNIKELKEGYLSAVVHEIASLMVKHNAIVVMEDLNFGFKRGRFAVERQIYQKFENMLIEKLNYLVFKDRKVTEPGGVLNAYQLANKSAKVTDVYKQCGWLFYIPAAYTSKIDPRTGFANLFITKGLTNVEKKKEFFGKFDSIRYDATESCFVFSFDYAKICDNADYKKKWDVYTRGTRLVYNKTERKNVSVNPTEELQCVFDEFGIKWNTGEDLIESISLIPAEKSNAKFFDVLLRMFNATLQMRNSVPNTDTDYLVSPVKAEDGSFFDSREEFKKGGDARLPIDCDANGAYHIALKGLYLLLNDFNRDNKGVIQNISNKDWFKFVQEKVYKDGGGGKRPAATKKAGQAKKKKGGGGGRSSDDEATADSQHAAPPKKKRKV

SEQ ID NO: 93 - protein, 1354 aa, synthetic construct; identical to SEQ ID NO: 57

SEQ ID NO: 94 - DNA, 27 bp, synthetic construct
  source 1..27: mol_type = other DNA
tcttccttgtcaaggctattggtcaag

SEQ ID NO: 95 - DNA, 27 bp, synthetic construct
  source 1..27: mol_type = other DNA
ttggccttgtcaaggctattggtcaag

SEQ ID NO: 96 - protein, 1293 aa, synthetic construct
MARIIDEFCGQMNGYTRSITLRNRLVPIGKTEENLKQFLEKDLERATAYPDIKNLIDAIHRNVIEDTLSKVALNWNEIFNILATYQNEKDKKKKAAIKKDLEKLQSGARKKIVEAFKKNPDFEKLFKEGLFKELLPELIKSAPVDEIAVKTKALECFNRFSTYFTGFHDNRKNMYSEEAKSTAISYRIVNENFPKFFANIKLFNYLKEHFPRIIIDTEESLKDYLKGKKLDSVFSIDGFNSVLAQSGIDFYNTVIGGISGEAGTKKTQGLNEKINLARQQLSKEEKNKLRGKMVVLFKQILSDRETSSFIPVGFANKEEVYSTVKEFNNSIAEKAVSKVRDLFLHREEFTLNEIFVPAKSLTDFSQAIFGSWSILSEGLFLLEKDSMKKALSESQEEKINKEIAKKDCSFTELQLAYERYCTEHNLPVEKFCKDYFDIVDYRGNGAKSEKTKVSILSEILETFLQLDFDHIQDLQQEKNAAIPIKAYLDEVQNLYHHLKLVDYRGEEQKDSTFYSKHDEILTDLSQIVPLYNKVRNFVTKKLGESKKIKLNFDCPTLANGWDENQESSNDAIILRKDGKYYLGIYNPNNKPKFAKKDSIVGDCYEKMAYKQIALPMGLGAFVRKCFGTAQKYGWGCPENCLNSEGKIIIKDEEAKGNLEAIIDCYKDFLNKYEKDGFKYKDYNFSFLDSASYEKLSDFFNDVKPQGYKLSFTSIPLSEIDKMIDEGKLFLFQIYNKDFAKKATGKKNLHTLYWENLFSVENLQDVVLKLNGEAELFWREASIKKDKVIVHKKGSILVNRTTTDGKSIPEAIYQEIYQLKNKMADSISDEAKRLLESGTVVCKVATHDIVKDKHFTENTYLFHCPITMNFKAKDRTNKEFNNHVLEVLNKNPDIKVIGLDRGERHLLYLSLINQKGEIECQKTLNLVEQVRNDKTVSVNYHEKLVHKEGSRDAARKNWQTIGNIKELKEGYLSAVVHEIASLMVKHNAIVVMEDLNFGFKRGRFAVERQIYQKFENMLIEKLNYLVFKDRKVTEPGGVLNAYQLANKSAKVTDVYKQCGWLFYIPAAYTSKIDPRTGFANLFITKGLTNVEKKKEFFGKFDSIRYDATESCFVFSFDYAKICDNADYKKKWDVYTRGTRLVYNKTERKNVSVNPTEELQCVFDEFGIKWNTGEDLIESISLIPAEKSNAKFFDVLLRMFNATLQMRNSVPNTDTDYLVSPVKAEDGSFFDSREEFKKGGDARLPIDCDANGAYHIALKGLYLLLNDFNRDNKGVIQNISNKDWFKFVQEKVYKD

SEQ ID NO: 97 - protein, 1293 aa, synthetic construct
MARIIDEFCGQMNGYSRSITLRNRLVPIGKTEENLKQFLEKDLERATAYPDIKNLIDAIHRNVIEDTLSKVALNWNEIFNILATYQNEKDKKKKAATKKDLEKLQSGARKKIVEAFKKNPDFEKLFKEGLFKELLPELIKSAPVDEIAVKTKALECFNRFSTYFTGFHDNRKNMYSEEAKSTAISYRIVNENFPKFFANIKLFNYLKEHFPRIIIDTEESLKDYLKGKKLDSVFSIDGFNSVLAQSGIDFYNTVIGGISGEAGTKKTQGLNEKINLARQQLSKEEKNKLRGKMVVLFKQILSDRETSSFIPVGFANKEEVYSTVKEFNNSIAEKAVSKVRDLFLHREEFTLNEIFVPAKSLTDFSQAIFGSWSILSEGLFLLEKDSMKKALSESQEEKINKEIAKKDCSFTELQLAYERYCTEHNLPVEKFCKDYFDIVDYRGNGAKSEKTKVSILSEILETFLQLDFDHIQDLQQEKNAAIPIKAYLDEVQNLYHHLKLVDYRGEEQKDSTFYSKHDEILTDLSQIVPLYNKVRNFVTKKLGESKKIKLNFDCPTLANGWDENQESSNDAIILRKDGKYYLGIYNPNNKPKFAKKDSIVGDCYEKMAYKQIALPMGLGAFVRKCFGTAQKYGWGCPENCLNSEGKIIIKDEEAKGNLEAIIDCYKDFLNKYEKDGFKYKDYNFSFLDSASYEKLSDFFNDVKPQGYKLSFTSIPLSEIDKMIDEGKLFLFQIYNKDFAKKATGKKNLHTLYWENLFSVENLQDVVLKLNGEAELFWREASIKKDKVIVHKKGSILVNRTTTDGKSIPEAIYQEIYQLKNKMADSISDEAKRLLESGTVVCKVATHDIVKDKHFTENTYLFHCPITMNFKAKDRTNKEFNNHVLEVLNKNPDIKVIGLDRGERHLLYLSLINQKGEIECQKTLNLVEQVRNDKTVSVNYHEKLVHKEGSRDAARKNWQTIGNIKELKEGYLSAVVHEIASLMVKHNAIVVMEDLNFGFKRGRFAVERQIYQKFENMLIEKLNYLVFKDRKVTEPGGVLNAYQLANKSAKVTDVYKQCGWLFYIPAAYTSKIDPRTGFANLFITKGLTNVEKKKEFFGKFDSIRYDATESCFVFSFDYAKICDNADYKKKWDVYTRGTRLVYNKTERKNVSVNPTEELQCVFDEFGIKWNTGEDLIESISLIPAEKSNAKFFDVLLRMFNATLQMRNSVPNTDTDYLVSPVKAEDGSFFDSREEFKKGGDARLPIDCDANGAYHIALKGLYLLLNDFNRDNKGVIQNISNKDWFKFVQEKVYKD

SEQ ID NO: 98 - protein, 1293 aa, synthetic construct
MARIIDEFCGQMNGYSRSITLRNRLVPIGKTEENLKQFLEKDLERATAYPDIKNLIDAIHRNVIEDTLSKVALNWNEIFNILATYQNEKDKKKKAAIKKDLEKLQSGARKKIVEAFKKNPDFEKLFKEGLFKELLPELIKSAPVDEIAVKTKALECFNRFSTYFTGFHDNRKNMYSEEAKSTAISYRIVNENFPKFFANIKLFNYLKEHFPLIIIDTEESLKDYLKGKKLDSVFSIDGFNSVLAQSGIDFYNTVIGGISGEAGTKKTQGLNEKINLARQQLSKEEKNKLRGKMVVLFKQILSDRETSSFIPVGFANKEEVYSTVKEFNNSIAEKAVSKVRDLFLHREEFTLNEIFVPAKSLTDFSQAIFGSWSILSEGLFLLEKDSMKKALSESQEEKINKEIAKKDCSFTELQLAYERYCTEHNLPVEKFCKDYFDIVDYRGNGAKSEKTKVSILSEILETFLQLDFDHIQDLQQEKNAAIPIKAYLDEVQNLYHHLKLVDYRGEEQKDSTFYSKHDEILTDLSQIVPLYNKVRNFVTKKLGESKKIKLNFDCPTLANGWDENQESSNDAIILRKDGKYYLGIYNPNNKPKFAKKDSIVGDCYEKMAYKQIALPMGLGAFVRKCFGTAQKYGWGCPENCLNSEGKIIIKDEEAKGNLEAIIDCYKDFLNKYEKDGFKYKDYNFSFLDSASYEKLSDFFNDVKPQGYKLSFTSIPLSEIDKMIDEGKLFLFQIYNKDFAKKATGKKNLHTLYWENLFSVENLQDVVLKLNGEAELFWREASIKKDKVIVHKKGSILVNRTTTDGKSIPEAIYQEIYQLKNKMADSISDEAKRLLESGTVVCKVATHDIVKDKHFTENTYLFHCPITMNFKAKDRTNKEFNNHVLEVLNKNPDIKVIGLDRGERHLLYLSLINQKGEIECQKTLNLVEQVRNDKTVSVNYHEKLVHKEGSRDAARKNWQTIGNIKELKEGYLSAVVHEIASLMVKHNAIVVMEDLNFGFKRGRFAVERQIYQKFENMLIEKLNYLVFKDRKVTEPGGVLNAYQLANKSAKVTDVYKQCGWLFYIPAAYTSKIDPRTGFANLFITKGLTNVEKKKEFFGKFDSIRYDATESCFVFSFDYAKICDNADYKKKWDVYTRGTRLVYNKTERKNVSVNPTEELQCVFDEFGIKWNTGEDLIESISLIPAEKSNAKFFDVLLRMFNATLQMRNSVPNTDTDYLVSPVKAEDGSFFDSREEFKKGGDARLPIDCDANGAYHIALKGLYLLLNDFNRDNKGVIQNISNKDWFKFVQEKVYKD

SEQ ID NO: 99 - protein, 1293 aa, synthetic construct
MARIIDEFCGQMNGYSRSITLRNRLVPIGKTEENLKQFLEKDLERATAYPDIKNLIDAIHRNVIEDTLSKVALNWNEIFNILATYQNEKDKKKKAAIKKDLEKLQSGARKKIVEAFKKNPDFEKLFREGLFKELLPELIKSAPVDEIAVKTKALECFNRFSTYFTGFHDNRKNMYSEEAKSTAISYRIVNENFPKFFANIKLFNYLKEHFPRIIIDTEESLKDYLKGKKLDSVFSIDGFNSVLAQSGIDFYNTVIGGISGEAGTKKTQGLNEKINLARQQLSKEEKNKLRGKMVVLFKQILSDRETSSFIPVGFANKEEVYSTVKEFNNSIAEKAVSKVRDLFLHREEFTLNEIFVPAKSLTDFSQAIFGSWSILSEGLFLLEKDSMKKALSESQEEKINKEIAKKDCSFTELQLAYERYCTEHNLPVEKFCKDYFDIVDYRGNGAKSEKTKVSILSEILETFLQLDFDHIQDLQQEKNAAIPIKAYLDEVQNLYHHLKLVDYRGEEQKDSTFYSKHDEILTDLSQIVPLYNKVRNFVTKKLGESKKIKLNFDCPTLANGWDENQESSNDAIILRKDGKYYLGIYNPNNKPKFAKKDSIVGDCYEKMAYKQIALPMGLGAFVRKCFGTAQKYGWGCPENCLNSEGKIIIKDEEAKGNLEAIIDCYKDFLNKYEKDGFKYKDYNFSFLDSASYEKLSDFFNDVKPQGYKLSFTSIPLSEIDKMIDEGKLFLFQIYNKDFAKKATGKKNLHTLYWENLFSVENLQDVVLKLNGEAELFWREASIKKDKVIVHKKGSILVNRTTTDGKSIPEAIYQEIYQLKNKMADSISDEAKRLLESGTVVCKVATHDIVKDKHFTENTYLFHCPITMNFKAKDRTNKEFNNHVLEVLNKNPDIKVIGLDRGERHLLYLSLINQKGEIECQKTLNLVEQVRNDKTVSVNYHEKLVHKEGSRDAARKNWQTIGNIKELKEGYLSAVVHEIASLMVKHNAIVVMEDLNFGFKRGRFAVERQIYQKFENMLIEKLNYLVFKDRKVTEPGGVLNAYQLANKSAKVTDVYKQCGWLFYIPAAYTSKIDPRTGFANLFITKGLTNVEKKKEFFGKFDSIRYDATESCFVFSFDYAKICDNADYKKKWDVYTRGTRLVYNKTERKNVSVNPTEELQCVFDEFGIKWNTGEDLIESISLIPAEKSNAKFFDVLLRMFNATLQMRNSVPNTDTDYLVSPVKAEDGSFFDSREEFKKGGDARLPIDCDANGAYHIALKGLYLLLNDFNRDNKGVIQNISNKDWFKFVQEKVYKD

SEQ ID NO: 100 - protein, 1293 aa, synthetic construct
MARIIDEFCGQMNGYSRSITLRNRLVPIGKTEENLKQFLEKDLERATAYPDIKNLIDAIHRNVIEDTLSKVALNWDEIFNILATYQNEKDKKKKAAIKKDLEKLQSGARKKIVEAFKKNPDFEKLFKEGLFKELLPELIKSAPVDEIAVKTKALECFNRFSTYFTGFHDNRKNMYSEEAKSTAISYRIVNENFPKFFANIKLFNYLKEHFPRIIIDTEESLKDYLKGKKLDSVFSIDGFNSVLAQSGIDFYNTVIGGISGEAGTKKTQGLNEKINLARQQLSKEEKNKLRGKMVVLFKQILSDRETSSFIPVGFANKEEVYSTVKEFNNSIAEKAVSKVRDLFLHREEFTLNEIFVPAKSLTDFSQAIFGSWSILSEGLFLLEKDSMKKALSESQEEKINKEIAKKDCSFTELQLAYERYCTEHNLPVEKFCKDYFDIVDYRGNGAKSEKTKVSILSEILETFLQLDFDHIQDLQQEKNAAIPIKAYLDEVQNLYHHLKLVDYRGEEQKDSTFYSKHDEILTDLSQIVPLYNKVRNFVTKKLGESKKIKLNFDCPTLANGWDENQESSNDAIILRKDGKYYLGIYNPNNKPKFAKKDSIVGDCYEKMAYKQIALPMGLGAFVRKCFGTAQKYGWGCPENCLNSEGKIIIKDEEAKGNLEAIIDCYKDFLNKYEKDGFKYKDYNFSFLDSASYEKLSDFFNDVKPQGYKLSFTSIPLSEIDKMIDEGKLFLFQIYNKDFAKKATGKKNLHTLYWENLFSVENLQDVVLKLNGEAELFWREASIKKDKVIVHKKGSILVNRTTTDGKSIPEAIYQEIYQLKNKMADSISDEAKRLLESGTVVCKVATHDIVKDKHFTENTYLFHCPITMNFKAKDRTNKEFNNHVLEVLNKNPDIKVIGLDRGERHLLYLSLINQKGEIECQKTLNLVEQVRNDKTVSVNYHEKLVHKEGSRDAARKNWQTIGNIKELKEGYLSAVVHEIASLMVKHNAIVVMEDLNFGFKRGRFAVERQIYQKFENMLIEKLNYLVFKDRKVTEPGGVLNAYQLANKSAKVTDVYKQCGWLFYIPAAYTSKIDPRTGFANLFITKGLTNVEKKKEFFGKFDSIRYDATESCFVFSFDYAKICDNADYKKKWDVYTRGTRLVYNKTERKNVSVNPTEELQCVFDEFGIKWNTGEDLIESISLIPAEKSNAKFFDVLLRMFNATLQMRNSVPNTDTDYLVSPVKAEDGSFFDSREEFKKGGDARLPIDCDANGAYHIALKGLYLLLNDFNRDNKGVIQNISNKDWFKFVQEKVYKD

SEQ ID NO: 101 - protein, 1293 aa, synthetic construct
MARIIDEFCGQMNGYSRSITLRNRLVPIGKTEENLKQFLEKDLERATAYPDIKNLIDAIHRNVIEDTLSKVALNWNEIFNILATYQNEKDKKKKAAIKKDLEKLQSGARKKIVEAFKKNPDFEKLFKEGLFKELLPELIKSAPVDEIAVKTKALECFNRFSTYFTGFHDNRKNMYSEEAKSTAISYRIVNENFPKFFANIKLFNYLKEHFPRIIIDTEESLKDYLKGKKLDSVFSIDGFNSVLAQSGIDFYNTVIGGISGEAGTKKTQGLNEKINLARQQLSKEEKNKLRGKMVVLFKQILSDSETSSFIPVGFANKEEVYSTVKEFNNSIAEKAVSKVRDLFLHREEFTLNEIFVPAKSLTDFSQAIFGSWSILSEGLFLLEKDSMKKALSESQEEKINKEIAKKDCSFTELQLAYERYCTEHNLPVEKFCKDYFDIVDYRGNGAKSEKTKVSILSEILETFLQLDFDHIQDLQQEKNAAIPIKAYLDEVQNLYHHLKLVDYRGEEQKDSTFYSKHDEILTDLSQIVPLYNKVRNFVTKKLGESKKIKLNFDCPTLANGWDENQESSNDAIILRKDGKYYLGIYNPNNKPKFAKKDSIVGDCYEKMAYKQIALPMGLGAFVRKCFGTAQKYGWGCPENCLNSEGKIIIKDEEAKGNLEAIIDCYKDFLNKYEKDGFKYKDYNFSFLDSASYEKLSDFFNDVKPQGYKLSFTSIPLSEIDKMIDEGKLFLFQIYNKDFAKKATGKKNLHTLYWENLFSVENLQDVVLKLNGEAELFWREASIKKDKVIVHKKGSILVNRTTTDGKSIPEAIYQEIYQLKNKMADSISDEAKRLLESGTVVCKVATHDIVKDKHFTENTYLFHCPITMNFKAKDRTNKEFNNHVLEVLNKNPDIKVIGLDRGERHLLYLSLINQKGEIECQKTLNLVEQVRNDKTVSVNYHEKLVHKEGSRDAARKNWQTIGNIKELKEGYLSAVVHEIASLMVKHNAIVVMEDLNFGFKRGRFAVERQIYQKFENMLIEKLNYLVFKDRKVTEPGGVLNAYQLANKSAKVTDVYKQCGWLFYIPAAYTSKIDPRTGFANLFITKGLTNVEKKKEFFGKFDSIRYDATESCFVFSFDYAKICDNADYKKKWDVYTRGTRLVYNKTERKNVSVNPTEELQCVFDEFGIKWNTGEDLIESISLIPAEKSNAKFFDVLLRMFNATLQMRNSVPNTDTDYLVSPVKAEDGSFFDSREEFKKGGDARLPIDCDANGAYHIALKGLYLLLNDFNRDNKGVIQNISNKDWFKFVQEKVYKD

SEQ ID NO: 102 - protein, 1293 aa, synthetic construct
MARIIDEFCGQMNGYSRSITLRNRLVPIGKTEENLKQFLEKDLERATAYPDIKNLIDAIHRNVIEDTLSKVALNWNEIFNILATYQNEKDKKKKAAIKKDLEKLQSGARKKIVEAFKKNPDFEKLFKEGLFKELLPELIKSAPVDEIAVKTKALECFNRFSTYFTGFHDNRKNMYSEEAKSTAISYRIVNENFPKFFANIKLFNYLKEHFPRIIIDTEESLKDYLKGKKLDSVFSIDGFNSVLAQSGIDFYNTMIGGISGEAGTKKTQGLNEKINLARQQLSKEEKNKLRGKMVVLFKQILSDRETSSFIPVGFANKEEVYSTVKEFNNSIAEKAVSKVRDLFLHREEFTLNEIFVPAKSLTDFSQAIFGSWSILSEGLFLLEKDSMKKALSESQEEKINKEIAKKDCSFTELQLAYERYCTEHNLPVEKFCKDYFDIVDYRGNGAKSEKTKVSILSEILETFLQLDFDHIQDLQQEKNAAIPIKAYLDEVQNLYHHLKLVDYRGEEQKDSTFYSKHDEILTDLSQIVPLYNKVRNFVTKKLGESKKIKLNFDCPTLANGWDENQESSNDAIILRKDGKYYLGIYNPNNKPKFAKKDSIVGDCYEKMAYKQIALPMGLGAFVRKCFGTAQKYGWGCPENCLNSEGKIIIKDEEAKGNLEAIIDCYKDFLNKYEKDGFKYKDYNFSFLDSASYEKLSDFFNDVKPQGYKLSFTSIPLSEIDKMIDEGKLFLFQIYNKDFAKKATGKKNLHTLYWENLFSVENLQDVVLKLNGEAELFWREASIKKDKVIVHKKGSILVNRTTTDGKSIPEAIYQEIYQLKNKMADSISDEAKRLLESGTVVCKVATHDIVKDKHFTENTYLFHCPITMNFKAKDRTNKEFNNHVLEVLNKNPDIKVIGLDRGERHLLYLSLINQKGEIECQKTLNLVEQVRNDKTVSVNYHEKLVHKEGSRDAARKNWQTIGNIKELKEGYLSAVVHEIASLMVKHNAIVVMEDLNFGFKRGRFAVERQIYQKFENMLIEKLNYLVFKDRKVTEPGGVLNAYQLANKSAKVTDVYKQCGWLFYIPAAYTSKIDPRTGFANLFITKGLTNVEKKKEFFGKFDSIRYDATESCFVFSFDYAKICDNADYKKKWDVYTRGTRLVYNKTERKNVSVNPTEELQCVFDEFGIKWNTGEDLIESISLIPAEKSNAKFFDVLLRMFNATLQMRNSVPNTDTDYLVSPVKAEDGSFFDSREEFKKGGDARLPIDCDANGAYHIALKGLYLLLNDFNRDNKGVIQNISNKDWFKFVQEKVYKD

SEQ ID NO: 103 - protein, 1293 aa, synthetic construct
MARIIDEFCGQMNGYSRSITLRNRLVPIGKTEENLKQFLEKDLERATAYPDIKNLIDAIHRNVIEDTLSKVALNWNEIFNILATYQNEKDKKKKAAIKKDLEKLQSGARKKIVEAFKKNPDFEKLFKEGLFKELLPELIKSAPVDEIAVKTKALECFNRFSTYFTGFHDNRKNMYSEEAKSTAISYRIVNENFPKFFANIKLFNYLKEHFPRIIIDTEESLKDYLKGKKLVSVFSIDGFNSVLAQSGIDFYNTVIGGISGEAGTKKTQGLNEKINLARQQLSKEEKNKLRGKMVVLFKQILSDRETSSFIPVGFANKEEVYSTVKEFNNSIAEKAVSKVRDLFLHREEFTLNEIFVPAKSLTDFSQAIFGSWSILSEGLFLLEKDSMKKALSESQEEKINKEIAKKDCSFTELQLAYERYCTEHNLPVEKFCKDYFDIVDYRGNGAKSEKTKVSILSEILETFLQLDFDHIQDLQQEKNAAIPIKAYLDEVQNLYHHLKLVDYRGEEQKDSTFYSKHDEILTDLSQIVPLYNKVRNFVTKKLGESKKIKLNFDCPTLANGWDENQESSNDAIILRKDGKYYLGIYNPNNKPKFAKKDSIVGDCYEKMAYKQIALPMGLGAFVRKCFGTAQKYGWGCPENCLNSEGKIIIKDEEAKGNLEAIIDCYKDFLNKYEKDGFKYKDYNFSFLDSASYEKLSDFFNDVKPQGYKLSFTSIPLSEIDKMIDEGKLFLFQIYNKDFAKKATGKKNLHTLYWENLFSVENLQDVVLKLNGEAELFWREASIKKDKVIVHKKGSILVNRTTTDGKSIPEAIYQEIYQLKNKMADSISDEAKRLLESGTVVCKVATHDIVKDKHFTENTYLFHCPITMNFKAKDRTNKEFNNHVLEVLNKNPDIKVIGLDRGERHLLYLSLINQKGEIECQKTLNLVEQVRNDKTVSVNYHEKLVHKEGSRDAARKNWQTIGNIKELKEGYLSAVVHEIASLMVKHNAIVVMEDLNFGFKRGRFAVERQIYQKFENMLIEKLNYLVFKDRKVTEPGGVLNAYQLANKSAKVTDVYKQCGWLFYIPAAYTSKIDPRTGFANLFITKGLTNVEKKKEFFGKFDSIRYDATESCFVFSFDYAKICDNADYKKKWDVYTRGTRLVYNKTERKNVSVNPTEELQCVFDEFGIKWNTGEDLIESISLIPAEKSNAKFFDVLLRMFNATLQMRNSVPNTDTDYLVSPVKAEDGSFFDSREEFKKGGDARLPIDCDANGAYHIALKGLYLLLNDFNRDNKGVIQNISNKDWFKFVQEKVYKD

SEQ ID NO: 104 - protein, 1293 aa, synthetic construct
MARIIDEFCGQMNGYSRSITLRNRLVPFGKTEENLKQFLEKDLERATAYPDIKNLIDAIHRNVIEDTLSKVALNWNEIFNILATYQNEKDKKKKAAIKKDLEKLQSGARKKIVEAFKKNPDFEKLFKEGLFKELLPELIKSAPVDEIAVKTKALECFNRFSTYFTGFHDNRKNMYSEEAKSTAISYRIVNENFPKFFANIKLFNYLKEHFPRIIIDTEESLKDYLKGKKLDSVFSIDGFNSVLAQSGIDFYNTVIGGISGEAGTKKTQGLNEKINLARQQLSKEEKNKLRGKMVVLFKQILSDRETSSFIPVGFANKEEVYSTVKEFNNSIAEKAVSKVRDLFLHREEFTLNEIFVPAKSLTDFSQAIFGSWSILSEGLFLLEKDSMKKALSESQEEKINKEIAKKDCSFTELQLAYERYCTEHNLPVEKFCKDYFDIVDYRGNGAKSEKTKVSILSEILETFLQLDFDHIQDLQQEKNAAIPIKAYLDEVQNLYHHLKLVDYRGEEQKDSTFYSKHDEILTDLSQIVPLYNKVRNFVTKKLGESKKIKLNFDCPTLANGWDENQESSNDAIILRKDGKYYLGIYNPNNKPKFAKKDSIVGDCYEKMAYKQIALPMGLGAFVRKCFGTAQKYGWGCPENCLNSEGKIIIKDEEAKGNLEAIIDCYKDFLNKYEKDGFKYKDYNFSFLDSASYEKLSDFFNDVKPQGYKLSFTSIPLSEIDKMIDEGKLFLFQIYNKDFAKKATGKKNLHTLYWENLFSVENLQDVVLKLNGEAELFWREASIKKDKVIVHKKGSILVNRTTTDGKSIPEAIYQEIYQLKNKMADSISDEAKRLLESGTVVCKVATHDIVKDKHFTENTYLFHCPITMNFKAKDRTNKEFNNHVLEVLNKNPDIKVIGLDRGERHLLYLSLINQKGEIECQKTLNLVEQVRNDKTVSVNYHEKLVHKEGSRDAARKNWQTIGNIKELKEGYLSAVVHEIASLMVKHNAIVVMEDLNFGFKRGRFAVERQIYQKFENMLIEKLNYLVFKDRKVTEPGGVLNAYQLANKSAKVTDVYKQCGWLFYIPAAYTSKIDPRTGFANLFITKGLTNVEKKKEFFGKFDSIRYDATESCFVFSFDYAKICDNADYKKKWDVYTRGTRLVYNKTERKNVSVNPTEELQCVFDEFGIKWNTGEDLIESISLIPAEKSNAKFFDVLLRMFNATLQMRNSVPNTDTDYLVSPVKAEDGSFFDSREEFKKGGDARLPIDCDANGAYHIALKGLYLLLNDFNRDNKGVIQNISNKDWFKFVQEKVYKD

SEQ ID NO: 105 - protein, 1293 aa, synthetic construct
MARIIDEFCGQMNGYSRSITLRNRLVPIGKTEENLKQFLEKDLERATAYPDIKNLIDAIHRNVIEDTLSKVALNWNEIFNILATYQNEKDKKKKAAIKKDLEKLQSGARKKIVEAFKKNPDFEKLFKEGLFKELLPELIKSAPVDEIAVKTKALECFNRFSTYFTGFHDNRKNMYSEEAKSTTISYRIVNENFPKFFANIKLFNYLKEHFPRIIIDTEESLKDYLKGKKLDSVFSIDGFNSVLAQSGIDFYNTVIGGISGEAGTKKTQGLNEKINLARQQLSKEEKNKLRGKMVVLFKQILSDRETSSFIPVGFANKEEVYSTVKEFNNSIAEKAVSKVRDLFLHREEFTLNEIFVPAKSLTDFSQAIFGSWSILSEGLFLLEKDSMKKALSESQEEKINKEIAKKDCSFTELQLAYERYCTEHNLPVEKFCKDYFDIVDYRGNGAKSEKTKVSILSEILETFLQLDFDHIQDLQQEKNAAIPIKAYLDEVQNLYHHLKLVDYRGEEQKDSTFYSKHDEILTDLSQIVPLYNKVRNFVTKKLGESKKIKLNFDCPTLANGWDENQESSNDAIILRKDGKYYLGIYNPNNKPKFAKKDSIVGDCYEKMAYKQIALPMGLGAFVRKCFGTAQKYGWGCPENCLNSEGKIIIKDEEAKGNLEAIIDCYKDFLNKYEKDGFKYKDYNFSFLDSASYEKLSDFFNDVKPQGYKLSFTSIPLSEIDKMIDEGKLFLFQIYNKDFAKKATGKKNLHTLYWENLFSVENLQDVVLKLNGEAELFWREASIKKDKVIVHKKGSILVNRTTTDGKSIPEAIYQEIYQLKNKMADSISDEAKRLLESGTVVCKVATHDIVKDKHFTENTYLFHCPITMNFKAKDRTNKEFNNHVLEVLNKNPDIKVIGLDRGERHLLYLSLINQKGEIECQKTLNLVEQVRNDKTVSVNYHEKLVHKEGSRDAARKNWQTIGNIKELKEGYLSAVVHEIASLMVKHNAIVVMEDLNFGFKRGRFAVERQIYQKFENMLIEKLNYLVFKDRKVTEPGGVLNAYQLANKSAKVTDVYKQCGWLFYIPAAYTSKIDPRTGFANLFITKGLTNVEKKKEFFGKFDSIRYDATESCFVFSFDYAKICDNADYKKKWDVYTRGTRLVYNKTERKNVSVNPTEELQCVFDEFGIKWNTGEDLIESISLIPAEKSNAKFFDVLLRMFNATLQMRNSVPNTDTDYLVSPVKAEDGSFFDSREEFKKGGDARLPIDCDANGAYHIALKGLYLLLNDFNRDNKGVIQNISNKDWFKFVQEKVYKD

SEQ ID NO: 106 - protein, 1293 aa, synthetic construct
MARIIDEFCGQMNGYSRSITLRNRLVPIGKTEENLKQFLEKDLERATAYPDIKNLIDAIHRNVIEDTLSKVALNWNEIFNILATYQNEKDKKKKAAIKKDLEKLQSGARKKIVEAFKKNPDFEKLFKEGLFKELLPELIKSAPVDEIAVKTKALECFNRFSTYFTGFHDNRKNMYSEEAKSTAISYRIVNENFPKFFANIKLFNYLKEHFPRIIIDTEESLKDYLKGKKLDSVFSIDGFNSVLAQSGIDFYNTVIGGISGEAGTKKTQGLNEKINLARQQLSKEEKNKLRGKMVVLFKQILSDRETSSFIPVGFANKEEVYSTVKEFNNSIAEKAVSKVRVLFLHREEFTLNEIFVPAKSLTDFSQAIFGSWSILSEGLFLLEKDSMKKALSESQEEKINKEIAKKDCSFTELQLAYERYCTEHNLPVEKFCKDYFDIVDYRGNGAKSEKTKVSILSEILETFLQLDFDHIQDLQQEKNAAIPIKAYLDEVQNLYHHLKLVDYRGEEQKDSTFYSKHDEILTDLSQIVPLYNKVRNFVTKKLGESKKIKLNFDCPTLANGWDENQESSNDAIILRKDGKYYLGIYNPNNKPKFAKKDSIVGDCYEKMAYKQIALPMGLGAFVRKCFGTAQKYGWGCPENCLNSEGKIIIKDEEAKGNLEAIIDCYKDFLNKYEKDGFKYKDYNFSFLDSASYEKLSDFFNDVKPQGYKLSFTSIPLSEIDKMIDEGKLFLFQIYNKDFAKKATGKKNLHTLYWENLFSVENLQDVVLKLNGEAELFWREASIKKDKVIVHKKGSILVNRTTTDGKSIPEAIYQEIYQLKNKMADSISDEAKRLLESGTVVCKVATHDIVKDKHFTENTYLFHCPITMNFKAKDRTNKEFNNHVLEVLNKNPDIKVIGLDRGERHLLYLSLINQKGEIECQKTLNLVEQVRNDKTVSVNYHEKLVHKEGSRDAARKNWQTIGNIKELKEGYLSAVVHEIASLMVKHNAIVVMEDLNFGFKRGRFAVERQIYQKFENMLIEKLNYLVFKDRKVTEPGGVLNAYQLANKSAKVTDVYKQCGWLFYIPAAYTSKIDPRTGFANLFITKGLTNVEKKKEFFGKFDSIRYDATESCFVFSFDYAKICDNADYKKKWDVYTRGTRLVYNKTERKNVSVNPTEELQCVFDEFGIKWNTGEDLIESISLIPAEKSNAKFFDVLLRMFNATLQMRNSVPNTDTDYLVSPVKAEDGSFFDSREEFKKGGDARLPIDCDANGAYHIALKGLYLLLNDFNRDNKGVIQNISNKDWFKFVQEKVYKD

SEQ ID NO: 107 - protein, 1293 aa, synthetic construct
MARIIDEFCGQMNGYSRSITLRNRLVPIGKTEENLKQFLEKDLERATAYPDIKNLIDAIHRNVIEDTLSKVALNWNEIFNILATYQNEKDKKKKAAIKKDLEKLQSGARKKIVEAFKKNPDFEKLFKEGLFKELLPELIKSAPVDEIAVKTKALECFNRFSTYFTGFHDNRKNMYSEEAKSTAISYRIVNENFPKFFANIKLFNYLKEHFPRIIIDTEESLKDYLKGKKLDSVFSIDGFNSVLAQSGIDFYNTVIGGISGEAGTKKTQGLNEKINLARQQLSKEEKNKLRGKMVVLFKQILSDRETSSFIPEGFANKEEVYSTVKEFNNSIAEKAVSKVRDLFLHREEFTLNEIFVPAKSLTDFSQAIFGSWSILSEGLFLLEKDSMKKALSESQEEKINKEIAKKDCSFTELQLAYERYCTEHNLPVEKFCKDYFDIVDYRGNGAKSEKTKVSILSEILETFLQLDFDHIQDLQQEKNAAIPIKAYLDEVQNLYHHLKLVDYRGEEQKDSTFYSKHDEILTDLSQIVPLYNKVRNFVTKKLGESKKIKLNFDCPTLANGWDENQESSNDAIILRKDGKYYLGIYNPNNKPKFAKKDSIVGDCYEKMAYKQIALPMGLGAFVRKCFGTAQKYGWGCPENCLNSEGKIIIKDEEAKGNLEAIIDCYKDFLNKYEKDGFKYKDYNFSFLDSASYEKLSDFFNDVKPQGYKLSFTSIPLSEIDKMIDEGKLFLFQIYNKDFAKKATGKKNLHTLYWENLFSVENLQDVVLKLNGEAELFWREASIKKDKVIVHKKGSILVNRTTTDGKSIPEAIYQEIYQLKNKMADSISDEAKRLLESGTVVCKVATHDIVKDKHFTENTYLFHCPITMNFKAKDRTNKEFNNHVLEVLNKNPDIKVIGLDRGERHLLYLSLINQKGEIECQKTLNLVEQVRNDKTVSVNYHEKLVHKEGSRDAARKNWQTIGNIKELKEGYLSAVVHEIASLMVKHNAIVVMEDLNFGFKRGRFAVERQIYQKFENMLIEKLNYLVFKDRKVTEPGGVLNAYQLANKSAKVTDVYKQCGWLFYIPAAYTSKIDPRTGFANLFITKGLTNVEKKKEFFGKFDSIRYDATESCFVFSFDYAKICDNADYKKKWDVYTRGTRLVYNKTERKNVSVNPTEELQCVFDEFGIKWNTGEDLIESISLIPAEKSNAKFFDVLLRMFNATLQMRNSVPNTDTDYLVSPVKAEDGSFFDSREEFKKGGDARLPIDCDANGAYHIALKGLYLLLNDFNRDNKGVIQNISNKDWFKFVQEKVYKD

SEQ ID NO: 108 - protein, 1293 aa, synthetic construct
MARIIDEFCGQMNGYSRSITLRNRLVPIGKTEENLKQFLEKDLERATAYPDIKNLIDAIHRNVIEDTLSKVALNWNEIFNILATYQNEKDKKKKAAIKKDLEKLQSGARKKIVEAFKKNPDFEKLFKEGLFKELLPELIKSAPVDEIAVKTKALECFNRFSTYFTGFHDNRKNMYSEEAKSTAISYRIVNENFPKFVANIKLFNYLKEHFPRIIIDTEESLKDYLKGKKLDSVFSIDGFNSVLAQSGIDFYNTVIGGISGEAGTKKTQGLNEKINLARQQLSKEEKNKLRGKMVVLFKQILSDRETSSFIPVGFANKEEVYSTVKEFNNSIAEKAVSKVRDLFLHREEFTLNEIFVPAKSLTDFSQAIFGSWSILSEGLFLLEKDSMKKALSESQEEKINKEIAKKDCSFTELQLAYERYCTEHNLPVEKFCKDYFDIVDYRGNGAKSEKTKVSILSEILETFLQLDFDHIQDLQQEKNAAIPIKAYLDEVQNLYHHLKLVDYRGEEQKDSTFYSKHDEILTDLSQIVPLYNKVRNFVTKKLGESKKIKLNFDCPTLANGWDENQESSNDAIILRKDGKYYLGIYNPNNKPKFAKKDSIVGDCYEKMAYKQIALPMGLGAFVRKCFGTAQKYGWGCPENCLNSEGKIIIKDEEAKGNLEAIIDCYKDFLNKYEKDGFKYKDYNFSFLDSASYEKLSDFFNDVKPQGYKLSFTSIPLSEIDKMIDEGKLFLFQIYNKDFAKKATGKKNLHTLYWENLFSVENLQDVVLKLNGEAELFWREASIKKDKVIVHKKGSILVNRTTTDGKSIPEAIYQEIYQLKNKMADSISDEAKRLLESGTVVCKVATHDIVKDKHFTENTYLFHCPITMNFKAKDRTNKEFNNHVLEVLNKNPDIKVIGLDRGERHLLYLSLINQKGEIECQKTLNLVEQVRNDKTVSVNYHEKLVHKEGSRDAARKNWQTIGNIKELKEGYLSAVVHEIASLMVKHNAIVVMEDLNFGFKRGRFAVERQIYQKFENMLIEKLNYLVFKDRKVTEPGGVLNAYQLANKSAKVTDVYKQCGWLFYIPAAYTSKIDPRTGFANLFITKGLTNVEKKKEFFGKFDSIRYDATESCFVFSFDYAKICDNADYKKKWDVYTRGTRLVYNKTERKNVSVNPTEELQCVFDEFGIKWNTGEDLIESISLIPAEKSNAKFFDVLLRMFNATLQMRNSVPNTDTDYLVSPVKAEDGSFFDSREEFKKGGDARLPIDCDANGAYHIALKGLYLLLNDFNRDNKGVIQNISNKDWFKFVQEKVYKD

SEQ ID NO: 109 - protein, 1293 aa, synthetic construct
MARIIDEFCGQMNGYSRSITLRNRLVPIGKTEENLKQFLEKDLERATAYPDIKNLIDAIHRNVIEDTLSKVALNWNEIFNILATYQNEKDKKKKAAIKKDLEKLQSGARKKIVEAFKKNPDFEKLFKEGLFKELLPELIKSAPVDEIAVKTKALECFNRFSTYFTGFHDNRKNMYSEEAKSTAISYRIVNENFPKFFANIKLFNYLNEHFPRIIIDTEESLKDYLKGKKLDSVFSIDGFNSVLAQSGIDFYNTVIGGISGEAGTKKTQGLNEKINLARQQLSKEEKNKLRGKMVVLFKQILSDRETSSFIPVGFANKEEVYSTVKEFNNSIAEKAVSKVRDLFLHREEFTLNEIFVPAKSLTDFSQAIFGSWSILSEGLFLLEKDSMKKALSESQEEKINKEIAKKDCSFTELQLAYERYCTEHNLPVEKFCKDYFDIVDYRGNGAKSEKTKVSILSEILETFLQLDFDHIQDLQQEKNAAIPIKAYLDEVQNLYHHLKLVDYRGEEQKDSTFYSKHDEILTDLSQIVPLYNKVRNFVTKKLGESKKIKLNFDCPTLANGWDENQESSNDAIILRKDGKYYLGIYNPNNKPKFAKKDSIVGDCYEKMAYKQIALPMGLGAFVRKCFGTAQKYGWGCPENCLNSEGKIIIKDEEAKGNLEAIIDCYKDFLNKYEKDGFKYKDYNFSFLDSASYEKLSDFFNDVKPQGYKLSFTSIPLSEIDKMIDEGKLFLFQIYNKDFAKKATGKKNLHTLYWENLFSVENLQDVVLKLNGEAELFWREASIKKDKVIVHKKGSILVNRTTTDGKSIPEAIYQEIYQLKNKMADSISDEAKRLLESGTVVCKVATHDIVKDKHFTENTYLFHCPITMNFKAKDRTNKEFNNHVLEVLNKNPDIKVIGLDRGERHLLYLSLINQKGEIECQKTLNLVEQVRNDKTVSVNYHEKLVHKEGSRDAARKNWQTIGNIKELKEGYLSAVVHEIASLMVKHNAIVVMEDLNFGFKRGRFAVERQIYQKFENMLIEKLNYLVFKDRKVTEPGGVLNAYQLANKSAKVTDVYKQCGWLFYIPAAYTSKIDPRTGFANLFITKGLTNVEKKKEFFGKFDSIRYDATESCFVFSFDYAKICDNADYKKKWDVYTRGTRLVYNKTERKNVSVNPTEELQCVFDEFGIKWNTGEDLIESISLIPAEKSNAKFFDVLLRMFNATLQMRNSVPNTDTDYLVSPVKAEDGSFFDSREEFKKGGDARLPIDCDANGAYHIALKGLYLLLNDFNRDNKGVIQNISNKDWFKFVQEKVYKD

SEQ ID NO: 110 - protein, 1293 aa, synthetic construct
MARIIDEFCGQMNGYSRSITLRNRLVPIGKTEENLKQFLEKDLERATAYPDIKNLIDAIHRNVIEDTLSKVALNWNEIFNILATYQNEKDKKKKAAIKKDLEKLQSGARKKIVEAFKKNPDFEKLFKEGLFKELLPELIKSAPVDEIAVKTKALECFNRFSTYFTGFHDNRKNMYSEEAKSTAISYRIVNENFPKFFANIKLFNYLKEHFPRIIIDTEESLKDYLKGKKLDSVFSIDGFNSVLAQSGIDFYNTVIGGISGEAGTKKTQGLNEKINLARQQLSKEEKNKLRGKMMVLFKQILSDRETSSFIPVGFANKEEVYSTVKEFNNSIAEKAVSKVRDLFLHREEFTLNEIFVPAKSLTDFSQAIFGSWSILSEGLFLLEKDSMKKALSESQEEKINKEIAKKDCSFTELQLAYERYCTEHNLPVEKFCKDYFDIVDYRGNGAKSEKTKVSILSEILETFLQLDFDHIQDLQQEKNAAIPIKAYLDEVQNLYHHLKLVDYRGEEQKDSTFYSKHDEILTDLSQIVPLYNKVRNFVTKKLGESKKIKLNFDCPTLANGWDENQESSNDAIILRKDGKYYLGIYNPNNKPKFAKKDSIVGDCYEKMAYKQIALPMGLGAFVRKCFGTAQKYGWGCPENCLNSEGKIIIKDEEAKGNLEAIIDCYKDFLNKYEKDGFKYKDYNFSFLDSASYEKLSDFFNDVKPQGYKLSFTSIPLSEIDKMIDEGKLFLFQIYNKDFAKKATGKKNLHTLYWENLFSVENLQDVVLKLNGEAELFWREASIKKDKVIVHKKGSILVNRTTTDGKSIPEAIYQEIYQLKNKMADSISDEAKRLLESGTVVCKVATHDIVKDKHFTENTYLFHCPITMNFKAKDRTNKEFNNHVLEVLNKNPDIKVIGLDRGERHLLYLSLINQKGEIECQKTLNLVEQVRNDKTVSVNYHEKLVHKEGSRDAARKNWQTIGNIKELKEGYLSAVVHEIASLMVKHNAIVVMEDLNFGFKRGRFAVERQIYQKFENMLIEKLNYLVFKDRKVTEPGGVLNAYQLANKSAKVTDVYKQCGWLFYIPAAYTSKIDPRTGFANLFITKGLTNVEKKKEFFGKFDSIRYDATESCFVFSFDYAKICDNADYKKKWDVYTRGTRLVYNKTERKNVSVNPTEELQCVFDEFGIKWNTGEDLIESISLIPAEKSNAKFFDVLLRMFNATLQMRNSVPNTDTDYLVSPVKAEDGSFFDSREEFKKGGDARLPIDCDANGAYHIALKGLYLLLNDFNRDNKGVIQNISNKDWFKFVQEKVYKD

SEQ ID NO: 111 - protein, 1293 aa, synthetic construct
MARIIDEFCGQMNGYSRSITLRNRLVPIGKTEENLKQFLEKDLERATAYPDIKNLIDAIHRNVIEDTLSKVALNWNEIFNILATYQNEKDKKKKAAIKKDLEKLQSGARKKIVEAFKKNPDFEKLFKEGLFKELLPELIKSAPVDEIAVKTKALECFNRFSTYFTGFHDNRKNMYSEEAKSTAISYRIVNENFPKFFANIKLFNYLKEHFPQIIIDTEESLKDYLKGKKLDSVFSIDGFNSVLAQSGIDFYNTVIGGISGEAGTKKTQGLNEKINLARQQLSKEEKNKLRGKMVVLFKQILSDRETSSFIPVGFANKEEVYSTVKEFNNSIAEKAVSKVRDLFLHREEFTLNEIFVPAKSLTDFSQAIFGSWSILSEGLFLLEKDSMKKALSESQEEKINKEIAKKDCSFTELQLAYERYCTEHNLPVEKFCKDYFDIVDYRGNGAKSEKTKVSILSEILETFLQLDFDHIQDLQQEKNAAIPIKAYLDEVQNLYHHLKLVDYRGEEQKDSTFYSKHDEILTDLSQIVPLYNKVRNFVTKKLGESKKIKLNFDCPTLANGWDENQESSNDAIILRKDGKYYLGIYNPNNKPKFAKKDSIVGDCYEKMAYKQIALPMGLGAFVRKCFGTAQKYGWGCPENCLNSEGKIIIKDEEAKGNLEAIIDCYKDFLNKYEKDGFKYKDYNFSFLDSASYEKLSDFFNDVKPQGYKLSFTSIPLSEIDKMIDEGKLFLFQIYNKDFAKKATGKKNLHTLYWENLFSVENLQDVVLKLNGEAELFWREASIKKDKVIVHKKGSILVNRTTTDGKSIPEAIYQEIYQLKNKMADSISDEAKRLLESGTVVCKVATHDIVKDKHFTENTYLFHCPITMNFKAKDRTNKEFNNHVLEVLNKNPDIKVIGLDRGERHLLYLSLINQKGEIECQKTLNLVEQVRNDKTVSVNYHEKLVHKEGSRDAARKNWQTIGNIKELKEGYLSAVVHEIASLMVKHNAIVVMEDLNFGFKRGRFAVERQIYQKFENMLIEKLNYLVFKDRKVTEPGGVLNAYQLANKSAKVTDVYKQCGWLFYIPAAYTSKIDPRTGFANLFITKGLTNVEKKKEFFGKFDSIRYDATESCFVFSFDYAKICDNADYKKKWDVYTRGTRLVYNKTERKNVSVNPTEELQCVFDEFGIKWNTGEDLIESISLIPAEKSNAKFFDVLLRMFNATLQMRNSVPNTDTDYLVSPVKAEDGSFFDSREEFKKGGDARLPIDCDANGAYHIALKGLYLLLNDFNRDNKGVIQNISNKDWFKFVQEKVYKD

SEQ ID NO: 112 - protein, 1293 aa, synthetic construct
MARIIDEFCGQMNGYSRSITLRNRLVPIGKTEENLKQFLEKDLERATAYPDIKNLIDAIHRNVIEDTLSKVALNWNEISNILATYQNEKDKKKKAAIKKDLEKLQSGARKKIVEAFKKNPDFEKLFKEGLFKELLPELIKSAPVDEIAVKTKALECFNRFSTYFTGFHDNRKNMYSEEAKSTAISYRIVNENFPKFFANIKLFNYLKEHFPRIIIDTEESLKDYLKGKKLDSVFSIDGFNSVLAQSGIDFYNTVIGGISGEAGTKKTQGLNEKINLARQQLSKEEKNKLRGKMVVLFKQILSDRETSSFIPVGFANKEEVYSTVKEFNNSIAEKAVSKVRDLFLHREEFTLNEIFVPAKSLTDFSQAIFGSWSILSEGLFLLEKDSMKKALSESQEEKINKEIAKKDCSFTELQLAYERYCTEHNLPVEKFCKDYFDIVDYRGNGAKSEKTKVSILSEILETFLQLDFDHIQDLQQEKNAAIPIKAYLDEVQNLYHHLKLVDYRGEEQKDSTFYSKHDEILTDLSQIVPLYNKVRNFVTKKLGESKKIKLNFDCPTLANGWDENQESSNDAIILRKDGKYYLGIYNPNNKPKFAKKDSIVGDCYEKMAYKQIALPMGLGAFVRKCFGTAQKYGWGCPENCLNSEGKIIIKDEEAKGNLEAIIDCYKDFLNKYEKDGFKYKDYNFSFLDSASYEKLSDFFNDVKPQGYKLSFTSIPLSEIDKMIDEGKLFLFQIYNKDFAKKATGKKNLHTLYWENLFSVENLQDVVLKLNGEAELFWREASIKKDKVIVHKKGSILVNRTTTDGKSIPEAIYQEIYQLKNKMADSISDEAKRLLESGTVVCKVATHDIVKDKHFTENTYLFHCPITMNFKAKDRTNKEFNNHVLEVLNKNPDIKVIGLDRGERHLLYLSLINQKGEIECQKTLNLVEQVRNDKTVSVNYHEKLVHKEGSRDAARKNWQTIGNIKELKEGYLSAVVHEIASLMVKHNAIVVMEDLNFGFKRGRFAVERQIYQKFENMLIEKLNYLVFKDRKVTEPGGVLNAYQLANKSAKVTDVYKQCGWLFYIPAAYTSKIDPRTGFANLFITKGLTNVEKKKEFFGKFDSIRYDATESCFVFSFDYAKICDNADYKKKWDVYTRGTRLVYNKTERKNVSVNPTEELQCVFDEFGIKWNTGEDLIESISLIPAEKSNAKFFDVLLRMFNATLQMRNSVPNTDTDYLVSPVKAEDGSFFDSREEFKKGGDARLPIDCDANGAYHIALKGLYLLLNDFNRDNKGVIQNISNKDWFKFVQEKVYKD

SEQ ID NO: 113 - protein, 1293 aa, synthetic construct
MARIIDEFCGQMNGYSRSITLRNRLVPIGKTEENLKQFLEKDLERATAYPDIKNLIDAIHRNVIEDTLSKVALNWNEIFNILATYQNEKDKKKKAAIKKDLEKLQSGARKKIVEAFKKNPDFEKLFKEGLFKELLPELIKSAPVDEIAVKTKALECFNRFSTYFTGFHDNRKNMYSEEAKSTAISYRIVNENFPKFFANIKLFNYLKEHFPRIIIDTEESLKDYLKGKKLDSVFSIDGFNSVLAQSGIDFYNTVIGGISGEAGTKKTQGLNEKINLARQQLSKEEKNKLRGKMVVLFKEILSDRETSSFIPVGFANKEEVYSTVKEFNNSIAEKAVSKVRDLFLHREEFTLNEIFVPAKSLTDFSQAIFGSWSILSEGLFLLEKDSMKKALSESQEEKINKEIAKKDCSFTELQLAYERYCTEHNLPVEKFCKDYFDIVDYRGNGAKSEKTKVSILSEILETFLQLDFDHIQDLQQEKNAAIPIKAYLDEVQNLYHHLKLVDYRGEEQKDSTFYSKHDEILTDLSQIVPLYNKVRNFVTKKLGESKKIKLNFDCPTLANGWDENQESSNDAIILRKDGKYYLGIYNPNNKPKFAKKDSIVGDCYEKMAYKQIALPMGLGAFVRKCFGTAQKYGWGCPENCLNSEGKIIIKDEEAKGNLEAIIDCYKDFLNKYEKDGFKYKDYNFSFLDSASYEKLSDFFNDVKPQGYKLSFTSIPLSEIDKMIDEGKLFLFQIYNKDFAKKATGKKNLHTLYWENLFSVENLQDVVLKLNGEAELFWREASIKKDKVIVHKKGSILVNRTTTDGKSIPEAIYQEIYQLKNKMADSISDEAKRLLESGTVVCKVATHDIVKDKHFTENTYLFHCPITMNFKAKDRTNKEFNNHVLEVLNKNPDIKVIGLDRGERHLLYLSLINQKGEIECQKTLNLVEQVRNDKTVSVNYHEKLVHKEGSRDAARKNWQTIGNIKELKEGYLSAVVHEIASLMVKHNAIVVMEDLNFGFKRGRFAVERQIYQKFENMLIEKLNYLVFKDRKVTEPGGVLNAYQLANKSAKVTDVYKQCGWLFYIPAAYTSKIDPRTGFANLFITKGLTNVEKKKEFFGKFDSIRYDATESCFVFSFDYAKICDNADYKKKWDVYTRGTRLVYNKTERKNVSVNPTEELQCVFDEFGIKWNTGEDLIESISLIPAEKSNAKFFDVLLRMFNATLQMRNSVPNTDTDYLVSPVKAEDGSFFDSREEFKKGGDARLPIDCDANGAYHIALKGLYLLLNDFNRDNKGVIQNISNKDWFKFVQEKVYKD

SEQ ID NO: 114 - protein, 1293 aa, synthetic construct
MARIIDEFCGQMNGYSRSITLRNRLVPIGKTEENLKQFLEKDLERATAYPDIKNLIDAIHRNVIEDTLSKVALNWNEIFNILATYQNEKDKKKKAAIKKDLEKLQSGARKKIVEAFKKNPDFEKLFKEGLFKELLPELIKSAPVDEIAVKTKALECFNRFSTYFTGFHDNRKNMYSEEAKSTAISYRIVNENFPKFFANIKLFNYLKEHFPRIIIDTEESLKDYLKGKKLDSVFSIDGFNSVLAQSGIDFYNTVIGGISGEAGTKKTQGLNEKINLARQQLSKEEKNKLRGKMVVLFKQILSDRETSSFIPVGFANKEEVYSTVKEFNNSIAEKAVSKVRDLFLHREEFTLNEIFVPAKSLTDFSQAIFGSWSILSEGLFLLEKDSMKKALSESQEEKINKEIAKKDCSFTELQLAYERYCTEHNLPVEKFCKDYFDIVDYRGNGAKSEKTKVSILSEILETFLQLDFDHIQDLQQEKNAAIPIKAYLDEVQNLYHHLKLVDYRGEEQKDSTFYSKHDEILTDLSQIVPLYNKVRNFVTKKLGESKKIKLNFDCPTLANGWDENQESSNDAIILRKDGKYYLGIYNPNNKPKFAKKDSIVGDCYEKMAYKQIALPMGLGAFVRKCFGTAQKYGWGCPENCLNSEGKIIIKDEEAKGNLEAIIDCYKDFLNKYEKDGFKYKDYNFSFLDSASYEKLSDFFNDVKPQGYKLSFTSIPLSEIDKMIDEGKLFLFQIYNKDFAKKATGKKNLHTLYWENLFSVENLQDVVLKLNGEAELFWREASIKKDKVIVHKKGSILVNRTTTDGKSIPEAIYQEIYQLKNKMADSISDEAKRLLESGTVVCKVATHDIVKDKHFTENTYLFHCPITMNFKAKDRTNKEFNNHVLEVLNKNPDIKVIGLDRGERHLLYLSLINQKGEIECQKTLNLVEQIRNDKTVSVNYHEKLVHKEGSRDAARKNWQTIGNIKELKEGYLSAVVHEIASLMVKHNAIVVMEDLNFGFKRGRFAVERQIYQKFENMLIEKLNYLVFKDRKVTEPGGVLNAYQLANKSAKVTDVYKQCGWLFYIPAAYTSKIDPRTGFANLFITKGLTNVEKKKEFFGKFDSIRYDATESCFVFSFDYAKICDNADYKKKWDVYTRGTRLVYNKTERKNVSVNPTEELQCVFDEFGIKWNTGEDLIESISLIPAEKSNAKFFDVLLRMFNATLQMRNSVPNTDTDYLVSPVKAEDGSFFDSREEFKKGGDARLPIDCDANGAYHIALKGLYLLLNDFNRDNKGVIQNISNKDWFKFVQEKVYKD

SEQ ID NO: 115 - protein, 1293 aa, synthetic construct
MARIIDEFCGQMNGYSRSITLRNRLVPIGKTEENLKQFLEKDLERATAYPDIKNLIDAIHRNVIEDTLSKVALNWNEIFNILATYQNEKDKKKKAAIKKDLEKLQSGARKKIVEAFKKNPDFEKLFKEGLFKELLPELIKSAPVDEIAVKTKALECFNRFSTYFTGFHDNRKNMYSEEAKSTAISYRIVNENFPKFFANIKLFNYLKEHFPRIIIDTEESLKDYLKGKKLDSVFSIDGFNSVLAQSGIDFYNTVIGGISGEAGTKKTQGLNEKINLARQQLSKEEKNKLRGKMVVLFKQILSDRETSSFIPVGFANKEEVYSTVKEFNNSIAEKAVSKVRDLFLHREEFTLNEIFVPAKSLTDFSQAIFGSWSILSEGLFLLEKDSMKKALSESQEEKINKEIAKKDCSFTELQLAYERYCTEHNLPVEKFCKDYFDIVDYRGNGAKSEKTKVSILSEILETFLQLDFDHIQDLQQEKNAAIPIKAYLDEVQNLYHHLKLVDYRGEEQKDSTFYSKHDEILTDLSQIVPLYNKVRNFVTKKLGESKKIKLNFDCPTLANGWDENQESSNDAIILRKDGKYYLGIYNPNNKPKFAKKDSIVGDCYEKMAYKQIALPMGLGAFVRKCFGTAQKYGWGCPENCLNSEGKIIIKDEEAKGNLEAIIDCYKDFLNKYEKDGFKYKDYNFSFLDSASYEKLSDFFNDVKPQGYKLSFTSIPLSEIDKMIDEGKLFLFQIYNKDFAKKATGKKNLHTLYWENLFSVENLQDVVLKLNGEAELFWREASIKKDKVIVHKKGSILVNRTTTDGKSIPEAIYQEIYQLKNKMADSISDEAKRLLESGTVVCKVATHDIVKDKHFTENTYLFHCPITMNFKAKDRTNKEFNNHVLEVLNKNPDIKVIGLDRGERHLLYLSLINQKGEIECQKTLNLVEQVRNDKTVSVNYHEKLVHKEGSRDAARKNWQTIGNIKELKEGYLSAVVHEIASLMVKHNAIVVMEDLNFGFKRGRFAVERQIYQKFENMLIEKLNYLVFKDRKVTEPGGVLNAYQLANKSAKVTDVYKQCGWLFYIPAAYTSKIDPRTGFANLFITKGLTNVEKKKEFFGKFDSIRYDATESCFVFSFDYAKICDNADYKKKWDVYTRGTRLVYNKTERKNVSVNPTEELQCVFDEFGIKWNTGEDLIESISLIPAEKSNAKFFDVLLRMFNATLQMRNSVPNTDTDYLVSPVKAEDGSFFDSREEFKKGGDARLPIDCGANGAYHIALKGLYLLLNDFNRDNKGVIQNISNKDWFKFVQEKVYKD

SEQ ID NO: 116 - protein, 1293 aa, synthetic construct
MARIIDEFCGQMNGYSRSITLRNRLVPIGKTEENLKQFLEKDLERATAYPDIKNLIDAIHRNVIEDTLSKVALNWNEIFNILATYQNEKDKKKKAAIKKDLEKLQSGARKKIVEAFKKNPDFEKLFKEGLFKELLPELIKSAPVDEIAVKTKALECFNRFSTYFTGFHDNRKNMYSEEAKSTAISYRIVNENFPKFFANIKLFNYLKEHFPRIIIDTEESLKDYLKGKKLDSVFSIDGFNSVLAQSGIDFYNTVIGGISGEAGTKKTQGLNEKINLARQQLSKEEKNKLRGKMVVLFKQILSDRETSSFIPVGFANKEEVYSTVKEFNNSIAEKAVSKVRDLFLHREEFTLNEIFVPAKSLTDFSQAIFGSWSILSEGLFLLEKDSMKKALSESQEEKINKEIAKKDCSFTELQLAYERYCTEHNLPVEKFCKDYFDIVDYRGNGAKSEKTKVSILSEILETFLQLDFDHIQDLQQEKNAAIPIKAYLDEVQNLYHHLKLVDYRGEEQKDSTFYSKHDEILTDLSQIVPLYNKVRNFVTKKLGESKKIKLNFDCPTLANGWDENQESSNDAIILRKDGKYYLGIYNPNNKPKFAKKDSIVGDCYEKMAYKQIALPMGLGAFVRKCFGTAQKYGWGCPENCLNSEGKIIIKDEEAKGNLEAIIDCYKDFLNKYEKDGFKYKDYNFSFLDSASYEKLSDFFNDVKPQGYKLSFTSIPLSEIDKMIDEGKLFLFQIYNKDFAKKATGKKNLHTLYWENLFSVENLQDVVLKLNGEAELFWREASIKKDKVIVHKKGSILVNRTTTDGKSIPEAIYQEIYQLKNKMADSISDEAKRLLESGTVVCKVATHDIVKDKHFTENTYLFHCPITMNFKAKDRTNKEFNNHVLEVLNKNPDIKVIGLDRGERHLLYLSLINQKGEIECQKTLNLVEQVRNDKTVSVNYHEKLVHKEGSRDAARKNWQTIGNIKELKEGYLSAVVHEIASLMVKHNAIVVMEDLNFGFKRGRFAVERQIYQKFENMLIEKLNYLVFKDRKVTEPGGVLNAYQLANKSAKVTDVYKQCGWLFYIPAAYTSKIDPRTGFANLFITKGLTNVEKKKEFFGKFDSIRYDASESCFVFSFDYAKICDNADYKKKWDVYTRGTRLVYNKTERKNVSVNPTEELQCVFDEFGIKWNTGEDLIESISLIPAEKSNAKFFDVLLRMFNATLQMRNSVPNTDTDYLVSPVKAEDGSFFDSREEFKKGGDARLPIDCDANGAYHIALKGLYLLLNDFNRDNKGVIQNISNKDWFKFVQEKVYKD

SEQ ID NO: 117 - protein, 1293 aa, synthetic construct
MARIIDEFCGQMNGYSRSITLRNRLVPIGKTEENLKQFLEKDLERATAYPDIKNLIDAIHRNVIEDTLSKVALNWNEIFNILATYQNEKDKKKKAAIKKDLEKLQSGARKKIVEAFKKNPDFEKLFKEGLFKELLPELIKSAPVDEIAVKTKALECFNRFSTYFTGFHDNRKNMYSEEAKSTAISYRIVNENFPKFFANIKLFNYLKEHFPRIIIDTEESLKDYLKGKKLDSVFSIDGFNSVLAQSGIDFYNTVIGGISGEAGTKKTQGLNEKINLARQQLSKEEKNKLRGKMVVLFKQILSDRETSSFIPVGFANKEEVYSTVKEFNNSIAEKAVSKVRDLFLHREEFTLNEIFVPAKSLTDFSQAIFGSWSILSEGLFLLEKDSMKKALSESQEEKINKEIAKKDCSFTELQLAYERYCTEHNLPVEKFCKDYFDIVDYRGNGAKSEKTKVSILSEILETFLQLDFDHIQDLQQEKNAAIPIKAYLDEVQNLYHHLKLVDYRGEEQKDSTFYSKHDEILTDLSQIVPLYNKVRNFVTKKLGESKKIKLNFDCPTLANGWDENQESSNDAIILRKDGKYYLGIYNPNNKPKFAKKDSIVGDCYEKMAYKQIALPMGLGAFVRKCFGTAQKYGWGCPENCLNSEGKIIIKDEEAKGNLEAIIDCYKDFLNKYEKDGFKYKDYNFSFLDSASYEKLSDFFNDVKPQGYKLSFTSIPLSEIDKMIDEGKLFLFQIYNKDFAKKATGKKNLHTLYWENLFSVENLQDVVLKLNGEAELFWREASIKKDKVIVHKKGSILVNRTTTDGKSIPEAIYQEIYQLKNKMADSISDEAKRLLESGTVVCKVATHDIVKDKHFTENTYLFHCPITMNFKAKDRTNKEFNNHVLEVLNKNPDIKVIGLDRGERHLLYLSLINQKGEIECQKTLNLVEQVRNDKTVSVNYHEKLVHKEGSRDAARKNWQTIGNIKELKEGYLSAVVHEIASLMVKHNAIVVMEDLNFGFKRGRFAVERQIYQKFENMLIEKLNYLVFKDRKVTEPGGVLNAYQLANKSAKVTDVYKQCGWLFYIPAAYTSKIDPRTGFANLFITKGLTNVEKKKEFFGKFDSIRYDATESCFVFSFDYAKICDNADYKKKWDVYTRGTRLVYNKTERKNVSVNPTEELQCVFDEFGIKWNTGEDLIESISLIPAEKSNAKFFDVLLRMFNATLQMRNSVPNTDTDYLVSPVKAEDGSFFDSREEFKKGGDARLPIDCDANGAYHIALKGLYLLLNDFNRDNKGVIQNISNKDWFRFVQEKVYKD

SEQ ID NO: 118 - protein, 1293 aa, synthetic construct
MARIIDEFCGQMNGYSRSITLRNRLVPIGKTEENLKQFLEKDLERATAYPDIKNLIDAIHRNVIEDTLSKVALNWNEIFNILATYQNEKDKKKKAAIKKDLEKLQSGARKKIVEAFKKNPDFEKLFKEGLFKELLPELIKSAPVDEIAVKTKALECFNRFSTYFTGFHDNRKNMYSEEAKSTAISYRIVNENFPKFFANIKLFNYLKEHFPRIIIDTEESLKDYLKGKKLDSVFSIDGFNSVLAQSGIDFYNTVIGGISGEAGTKKTQGLNEKINLARQQLSKEEKNKLRGKMVVLFKQILSDRETSSFIPVGFANKEEVYSTVKEFNNSIAEKAVSKVRDLFLHREEFTLNEIFVPAKSLTDFSQAIFGSWSILSEGLFLLEKDSMKKALSESQEEKINKEIAKKDCSFTELQLAYERYCTEHNLPVEKFCKDYFDIVDYRGNGAKSEKTKVSILSEILETFLQLDFDHIQDLQQEKNAAIPIKAYLDEVQNLYHHLKLVDYRGEEQKDSTFYSKHDEILTDLSQIVPLYNKVRNFVTKKLGESKKIKLNFDCPTLANGWDENQESSNDAIILRKDGKYYLGIYNPNNKPKFAKKDSIVGDCYEKMAYKQIALPMGLGAFVRKCFGTAQKYGWGCPENCLNSEGKIIIKDEEAKGNLEAIIDCYKDFLNKYEKDGFKYKDYNFSFLDSASYEKLSDFFNDVKPQGYKLSFTSIPLSEIDKMIDEGKLFLFQIYNKDFAKKATGKKNLHTLYWENLFSVENLQDVVLKLNGEAELFWREASIKKDKVIVHKKGSILVNRTTTDGKSIPEAIYQEIYQLKNKMADSISDEAKRLLESGTVVCKVATHDIVKDKHFTENTYLFHCPITMNFKAKDRTNKEFNNHVLEVLNKNPDIKVIGLDRGERHLLYLSLINQKGEIECQKTLNLVEQDRNDKTVSVNYHEKLVHKEGSRDAARKNWQTIGNIKELKEGYLSAVVHEIASLMVKHNAIVVMEDLNFGFKRGRFAVERQIYQKFENMLIEKLNYLVFKDRKVTEPGGVLNAYQLANKSAKVTDVYKQCGWLFYIPAAYTSKIDPRTGFANLFITKGLTNVEKKKEFFGKFDSIRYDATESCFVFSFDYAKICDNADYKKKWDVYTRGTRLVYNKTERKNVSVNPTEELQCVFDEFGIKWNTGEDLIESISLIPAEKSNAKFFDVLLRMFNATLQMRNSVPNTDTDYLVSPVKAEDGSFFDSREEFKKGGDARLPIDCDANGAYHIALKGLYLLLNDFNRDNKGVIQNISNKDWFKFVQEKVYKD

SEQ ID NO: 119 - protein, 1293 aa, synthetic construct
MARIIDEFCGQMNGYSRSITLRNRLVPIGKTEENLKQFLEKDLERATAYPDIKNLIDAIHRNVIEDTLSKVALNWNEIFNILATYQNEKDKKKKAAIKKDLEKLQSGARKKIVEAFKKNPDFEKLFKEGLFKELLPELIKSAPVDEIAVKTKALECFNRFSTYFTGFHDNRKNMYSEEAKSTAISYRIVNENFPKFFANIKLFNYLKEHFPRIIIDTEESLKDYLKGKKLDSVFSIDGFNSVLAQSGIDFYNTVIGGISGEAGTKKTQGLNEKINLARQQLSKEEKNKLRGKMVVLFKQILSDRETSSFIPVGFANKEEVYSTVKEFNNSIAEKAVSKVRDLFLHREEFTLNEIFVPAKSLTDFSQAIFGSWSILSEGLFLLEKDSMKKALSESQEEKINKEIAKKDCSFTELQLAYERYCTEHNLPVEKFCKDYFDIVDYRGNGAKSEKTKVSILSEILETFLQLDFDHIQDLQQEKNAAIPIKAYLDEVQNLYHHLKLVDYRGEEQKDSTFYSKHDEILTDLSQIVPLYNKVRNFVTKKLGESKKIKLNFDCPTLANGWDENQESSNDAIILRKDGKYYLGIYNPNNKPKFAKKDSIVGDCYEKMAYKQIALPMGLGAFVRKCFGTAQKYGWGCPENCLNSEGKIIIKDEEAKGNLEAIIDCYKDFLNKYEKDGFKYKDYNFSFLDSASYEKLSDFFNDVKPQGYKLSFTSIPLSEIDKMIDEGKLFLFQIYNKDFAKKATGKKNLHTLYWENLFSVENLQDVVLKLNGEAELFWREASIKKDKVIVHKKGSILVNRTTTDGKSIPEAIYQEIYQLKNKMADSISDEAKRLLESGTVVCKVATHDIVKDKHFTENTYLFHCPITMNFKAKDRTNKEFNNHVLEVLNKNPDIKVIGLDRGERHLLYLSLINQKGEIECQKTLNLVEQVRNDKTVSVNYHEKLVHKEGSRDAARKNWQTIGNIKELKEGYLSAVVHEIASLMVKHNAIVVMEDLNFGFKRGRFAVERQIYQKFENMLIEKLNYLVFKDRKVTEPGGVLNAYQLANKSAKVTDVYKQCGWLFYIPAAYTSKIDPRTGFANLFITKGLTNVEKKKEFFGKFDSIRYDATESCFVFSFDYAKICDNADYKKKWDVYTRGTRLVYNKTERKNVSVNPTEELQCVFDEFGIKWNTGEDLIESISLIPAEKSNAKFFEVLLRMFNATLQMRNSVPNTDTDYLVSPVKAEDGSFFDSREEFKKGGDARLPIDCDANGAYHIALKGLYLLLNDFNRDNKGVIQNISNKDWFKFVQEKVYKD

SEQ ID NO: 120 - protein, 1293 aa, synthetic construct
MARIIDEFCGQMNGYSRSITLRNRLVPIGKTEENLKQFLEKDLERATAYPDIKNLIDAIHRNVIEDTLSKVALNWNEIFNILATYQNEKDKKKKAAIKKDLEKLQSGARKKIVEAFKKNPDFEKLFKEGLFKELLPELIKSAPVDEIAVKTKALECFNRFSTYFTGFHDNRKNMYSEEAKSTAISYRIVNENFPKFFANIKLFNYLKEHFPRIIIDTEESLKDYLKGKKLDSVFSIDGFNSVLAQSGIDFYNTVIGGISGEAGTKKTQGLNEKINLARQQLSKEEKNKLRGKMVVLFKQILSDRETSSFIPVGFANKEEVYSTVKEFNNSIAEKAVSKVRDLFLHREEFTLNEIFVPAKSLTDFSQAIFGSWSILSEGLFLLEKDSMKKALSESQEEKINKEIAKKDCSFTELQLAYERYCTEHNLPVEKFCKDYFDIVDYRGNGAKSEKTKVSILSEILETFLQLDFDHIQDLQQEKNAAIPIKAYLDEVQNLYHHLKLVDYRGEEQKDSTFYSKHDEILTDLSQIVPLYNKVRNFVTKKLGESKKIKLNFDCPTLANGWDENQESSNDAIILRKDGKYYLGIYNPNNKPKFAKKDSIVGDCYEKMAYKQIALPMGLGAFVRKCFGTAQKYGWGCPENCLNSEGKIIIKDEEAKGNLEAIIDCYKDFLNKYEKDGFKYKDYNFSFLDSASYEKLSDFFNDVKPQGYKLSFTSIPLSEIDKMIDEGKLFLFQIYNKDFAKKATGKKNLHTLYWENLFSVENLQDVVLKLNGEAELFWREASIKKDKVIVHKKGSILVNRTTTDGKSIPEAIYQEIYQLKNKMADSISDEAKRLLESGTVVCKVATHDIVKDKHFTENTYLFHCPITMNFKAKDRTNKEFNNHVLEVLNKNPDIKVIGLDRGERHLLYLSLINQKGEIECQKTLNLVEQVRNDKTVSVNYHEKLVHKEGSRDAARKNWQTIGNIKELKEGYLSAVVHEIASLMVKHNAIVVMEDLNFGFKRGRFAVERQIYQKFENMLIEKLNYLVFKDRKVTEPGGVLNAYQLANKSAKVTDVYKQCGWLFYIPAAYTSKIDPRTGFANLFITKGLTNVEKKKEFFGKFDSIRYDATESCFVFSFDYAKICDNADYKKKWDVYTRGTRLVYNKTERKNVSVNPTEELQCVFDEFGIKWNTGEDLIESISLIPAEKSNAKFFDVLLRMFNATLHMRNSVPNTDTDYLVSPVKAEDGSFFDSREEFKKGGDARLPIDCDANGAYHIALKGLYLLLNDFNRDNKGVIQNISNKDWFKFVQEKVYKD

SEQ ID NO: 121 - protein, 1293 aa, synthetic construct
MARIIDEFCGQMNGYSRSITLRNRLVPIGKTEENLKQFLEKDLERATAYPDIKNLIDAIHRNVIEDTLSKVALNWNEIFNILATYQNEKDKKKKAAIKKDLEKLQSGARKKIVEAFKKNPDFEKLFKEGLFKELLPELIKSAPVDEIAVKTKALECFNRFSTYFTGFHDNRKNMYSEEAKSTAISYRIVNENFPKFFANIKLFNYLKEHFPRIIIDTEESLKDYLKGKKLDSVFSIDGFNSVLAQSGIDFYNTVIGGISGEAGTKKTQGLNEKINLARQQLSKEEKNKLRGKMVVLFKQILSDRETSSFIPVGFANKEEVYSTVKEFNNSIAEKAVSKVRDLFLHREEFTLNEIFVPAKSLTDFSQAIFGSWSILSEGLFLLEKDSMKKALSESQEEKINKEIAKKDCSFTELQLAYERYCTEHNLPVEKFCKDYFDIVDYRGNGAKSEKTKVSILSEILETFLQLDFDHIQDLQQEKNAAIPIKAYLDEVQNLYHHLKLVDYRGEEQKDSTFYSKHDEILTDLSQIVPLYNKVRNFVTKKLGESKKIKLNFDCPTLANGWDENQESSNDAIILRKDGKYYLGIYNPNNKPKFAKKDSIVGDCYEKMAYKQIALPMGLGAFVRKCFGTAQKYGWGCPENCLNSEGKIIIKDEEAKGNLEAIIDCYKDFLNKYEKDGFKYKDYNFSFLDSASYEKLSDFFNDVKPQGYKLSFTSIPLSEIDKMIDEGKLFLFQIYNKDFAKKATGKKNLHTLYWENLFSVENLQDVVLKLNGEAELFWREASIKKDKVIVHKKGSILVNRTTTDGKSIPEAIYQEIYQLKNKMADSISDEAKRLLESGTVVCKVATHDIVKDKHFTENTYLFHCPITMNFKAKDRTNKEFNNHVLEVLNKNPDIKVIGLDRGERHLLYLSLINQKGEIECQKTLNLVEQVRNDKTVSVNYHEKLVHKEGSRDAARKNWQTIGNIKELKEGYLSAVVHEIASLMVKHNAIVVMEDLNFGFKRGRFAVERQIYQKFENMLIEKLNYLVFKDRKVTEPGGVLNAYQLANKSAKVTDVYKQCGWLFYNPAAYTSKIDPRTGFANLFITKGLTNVEKKKEFFGKFDSIRYDATESCFVFSFDYAKICDNADYKKKWDVYTRGTRLVYNKTERKNVSVNPTEELQCVFDEFGIKWNTGEDLIESISLIPAEKSNAKFFDVLLRMFNATLQMRNSVPNTDTDYLVSPVKAEDGSFFDSREEFKKGGDARLPIDCDANGAYHIALKGLYLLLNDFNRDNKGVIQNISNKDWFKFVQEKVYKD

SEQ ID NO: 122 - protein, 1293 aa, synthetic construct
MARIIDEFCGQMNGYSRSITLRNRLVPIGKTEENLKQFLEKDLERATAYPDIKNLIDAIHRNVIEDTLSKVALNWNEIFNILATYQNEKDKKKKAAIKKDLEKLQSGARKKIVEAFKKNPDFEKLFKEGLFKELLPELIKSAPVDEIAVKTKALECFNRFSTYFTGFHDNRKNMYSEEAKSTAISYRIVNENFPKFFANIKLFNYLKEHFPRIIIDTEESLKDYLKGKKLDSVFSIDGFNSVLAQSGIDFYNTVIGGISGEAGTKKTQGLNEKINLARQQLSKEEKNKLRGKMVVLFKQILSDRETSSFIPVGFANKEEVYSTVKEFNNSIAEKAVSKVRDLFLHREEFTLNEIFVPAKSLTDFSQAIFGSWSILSEGLFLLEKDSMKKALSESQEEKINKEIAKKDCSFTELQLAYERYCTEHNLPVEKFCKDYFDIVDYRGNGAKSEKTKVSILSEILETFLQLDFDHIQDLQQEKNAAIPIKAYLDEVQNLYHHLKLVDYRGEEQKDSTFYSKHDEILTDLSQIVPLYNKVRNFVTKKLGESKKIKLNFDCPTLANGWDENQESSNDAIILRKDGKYYLGIYNPNNKPKFAKKDSIVGDCYEKMAYKQIALPMGLGAFVRKCFGTAQKYGWGCPENCLNSEGKIIIKDEEAKGNLEAIIDCYKDFLNKYEKDGFKYKDYNFSFLDSASYEKLSDFFNDVKPQGYKLSFTSIPLSEIDKMIDEGKLFLFQIYNKDFAKKATGKKNLHTLYWENLFSVENLQDVVLKLNGEAELFWREASIKKDKVIVHKKGSILVNRTTTDGKSIPEAIYQEIYQLKNKMADSISDEAKRLLESGTVVCKVATHDIVKDKHFTENTYLFHCPITMNFKAKDRTNKEFNNHVLEVLNKNPDIKVIGLDRGERHLLYLSLINQKGEIECQKTLNLVEQVRNDMTVSVNYHEKLVHKEGSRDAARKNWQTIGNIKELKEGYLSAVVHEIASLMVKHNAIVVMEDLNFGFKRGRFAVERQIYQKFENMLIEKLNYLVFKDRKVTEPGGVLNAYQLANKSAKVTDVYKQCGWLFYIPAAYTSKIDPRTGFANLFITKGLTNVEKKKEFFGKFDSIRYDATESCFVFSFDYAKICDNADYKKKWDVYTRGTRLVYNKTERKNVSVNPTEELQCVFDEFGIKWNTGEDLIESISLIPAEKSNAKFFDVLLRMFNATLQMRNSVPNTDTDYLVSPVKAEDGSFFDSREEFKKGGDARLPIDCDANGAYHIALKGLYLLLNDFNRDNKGVIQNISNKDWFKFVQEKVYKD

SEQ ID NO: 123 - protein, 1293 aa, synthetic construct
MARIIDEFCGQMNGYSRSITLRNRLVPIGKTEENLKQFLEKDLERATAYPDIKNLIDAIHRNVIEDTLSKVALNWNEIFNILATYQNEKDKKKKAAIKKDLEKLQSGARKKIVEAFKKNPDFEKLFKEGLFKELLPELIKSAPVDEIAVKTKALECFNRFSTYFTGFHDNRKNMYSEEAKSTAISYRIVNENFPKFFANIKLFNYLKEHFPRIIIDTEESLKDYLKGKKLDSVFSIDGFNSVLAQSGIDFYNTVIGGISGEAGTKKTQGLNEKINLARQQLSKEEKNKLRGKMVVLFKQILSDRETSSFIPVGFANKEEVYSTVKEFNNSIAEKAVSKVRDLFLHREEFTLNEIFVPAKSLTDFSQAIFGSWSILSEGLFLLEKDSMKKALSESQEEKINKEIAKKDCSFTELQLAYERYCTEHNLPVEKFCKDYFDIVDYRGNGAKSEKTKVSILSEILETFLQLDFDHIQDLQQEKNAAIPIKAYLDEVQNLYHHLKLVDYRGEEQKDSTFYSKHDEILTDLSQIVPLYNKVRNFVTKKLGESKKIKLNFDCPTLANGWDENQESSNDAIILRKDGKYYLGIYNPNNKPKFAKKDSIVGDCYEKMAYKQIALPMGLGAFVRKCFGTAQKYGWGCPENCLNSEGKIIIKDEEAKGNLEAIIDCYKDFLNKYEKDGFKYKDYNFSFLDSASYEKLSDFFNDVKPQGYKLSFTSIPLSEIDKMIDEGKLFLFQIYNKDFAKKATGKKNLHTLYWENLFSVENLQDVVLKLNGEAELFWREASIKKDKVIVHKKGSILVNRTTTDGKSIPEAIYQEIYQLKNKMADSISDEAKRLLESGTVVCKVATHDIVKDKHFTENTYLFHCPITMNFKAKDRTNKEFNNHVLEVLNKNPDIKVIGLDRGERHLLYLSLINQKGEIECQKTLNLVEQVRNDKTVSVNYHEKLVHKEGSRDAARKNWQTIGNIKELKEGYLSAVVHEIASLMVKHNAIVVMEDLNFGFKRGRFAVERQIYQKFENMLIEKLNYLVFKDRKVTEPGGVLNAYQLANKSAKVTDVYKQCGWLFYIPAAYTSKIDPRTGFANLFITKGLTNVEKKKEFFGKFDSIRYDATESCFVFSFDYAKICDNADYKKKWDVYTRGTRLVYNKTERKNVSVNPTEELQCVFDEFGIKWNTGEDLIESISLIPAEKSNAKFFDVLLRMFNATLQMRNSVPNTDTDYLVSPVKAEDGSFFDSREEFKKGGDARLPIDCDASGAYHIALKGLYLLLNDFNRDNKGVIQNISNKDWFKFVQEKVYKD

SEQ ID NO: 124 - protein, 1293 aa, synthetic construct
MARIIDEFCGQMNGYSRSITLRNRLVPIGKTEENLKQFLEKDLERATAYPDIKNLIDAIHRNVIEDTLSKVALNWNEIFNILATYQNEKDKKKKAAIKKDLEKLQSGARKKIVEAFKKNPDFEKLFKEGLFKELLPELIKSAPVDEIAVKTKALECFNRFSTYFTGFHDNRKNMYSEEAKSTAISYRIVNENFPKFFANIKLFNYLKEHFPRIIIDTEESLKDYLKGKKLDSVFSIDGFNSVLAQSGIDFYNTVIGGISGEAGTKKTQGLNEKINLARQQLSKEEKNKLRGKMVVLFKQILSDRETSSFIPVGFANKEEVYSTVKEFNNSIAEKAVSKVRDLFLHREEFTLNEIFVPAKSLTDFSQAIFGSWSILSEGLFLLEKDSMKKALSESQEEKINKEIAKKDCSFTELQLAYERYCTEHNLPVEKFCKDYFDIVDYRGNGAKSEKTKVSILSEILETFLQLDFDHIQDLQQEKNAAIPIKAYLDEVQNLYHHLKLVDYRGEEQKDSTFYSKHDEILTDLSQIVPLYNKVRNFVTKKLGESKKIKLNFDCPTLANGWDENQESSNDAIILRKDGKYYLGIYNPNNKPKFAKKDSIVGDCYEKMAYKQIALPMGLGAFVRKCFGTAQKYGWGCPENCLNSEGKIIIKDEEAKGNLEAIIDCYKDFLNKYEKDGFKYKDYNFSFLDSASYEKLSDFFNDVKPQGYKLSFTSIPLSEIDKMIDEGKLFLFQIYNKDFAKKATGKKNLHTLYWENLFSVENLQDVVLKLNGEAELFWREASIKKDKVIVHKKGSILVNRTTTDGKSIPEAIYQEIYQLKNKMADSISDEAKRLLESGTVVCKVATHDIVKDKHFTENTYLFHCPITMNFKAKDRTNKEFNNHVLEVLNKNPDIKVIGLDRGERHLLYLSLINQKGEIECQKTLNLVEQVRNDKTVSVNYHEKLVHKEGSRDAARKNWQTIGNIKELKEGYLSAVVHEIASLMVKHNAIVVMEDLNFGFKRGRFAVERQIYQKFENMLIEKLNYLVFKDRKVTEPGGVLNAYQLANKSAKVTDVYKQCGWLFYIPAAYTSKIDPRTGFANLFITKGLTNVEKKKEFFGKFDSIRYDATESCFVFSFDYAKICDNADYKKKWDVYTRGTRLVYNKTERKNVSVNPTEELQCVFDEFGIKWNTGEDLIESISLIPAEKSNAKFFDVLLRMFNATLQMRNSVPNTDTDYLVSPVKAEDGSFFDSREEFKKGGDARLPIDCDANGVYHIALKGLYLLLNDFNRDNKGVIQNISNKDWFKFVQEKVYKD

SEQ ID NO: 125 - protein, 1293 aa, synthetic construct
MARIIDEFCGQMNGYSRSITLRNRLVPIGKTEENLKQFLEKDLERATAYPDIKNLIDAIHRNVIEDTLSKVALNWNEIFNILATYQNEKDKKKKAAIKKDLEKLQSGARKKIVEAFKKNPDFEKLFKEGLFKELLPELIKSAPVDEIAVKTKALECFNRFSTYFTGFHDNRKNMYSEEAKSTAISYRIVNENFPKFFANIKLFNYLKEHFPRIIIDTEESLKDYLKGKKLDSVFSIDGFNSVLAQSGIDFYNTVIGGISGEAGTKKTQGLNEKINLARQQLSKEEKNKLRGKMVVLFKQILSDRETSSFIPVGFANKEEVYSTVKEFNNSIAEKAVSKVRDLFLHREEFTLNEIFVPAKSLTDFSQAIFGSWSILSEGLFLLEKDSMKKALSESQEEKINKEIAKKDCSFTELQLAYERYCTEHNLPVEKFCKDYFDIVDYRGNGAKSEKTKVSILSEILETFLQLDFDHIQDLQQEKNAAIPIKAYLDEVQNLYHHLKLVDYRGEEQKDSTFYSKHDEILTDLSQIVPLYNKVRNFVTKKLGESKKIKLNFDCPTLANGWDENQESSNDAIILRKDGKYYLGIYNPNNKPKFAKKDSIVGDCYEKMAYKQIALPMGLGAFVRKCFGTAQKYGWGCPENCLNSEGKIIIKDEEAKGNLEAIIDCYKDFLNKYEKDGFKYKDYNFSFLDSASYEKLSDFFNDVKPQGYKLSFTSIPLSEIDKMIDEGKLFLFQIYNKDFAKKATGKKNLHTLYWENLFSVENLQDVVLKLNGEAELFWREASIKKDKVIVHKKGSILVNRTTTDGKSIPEAIYQEIYQLKNKMADSISDEAKRLLESGTVVCKVATHDIVKDKHFTENTYLFHCPITMNFKAKDRTNKEFNNHVLEVLNKNPDIKVIGLDRGERHLLYLSLINQKGEIECQKTLNLVEQVRNDKTVSVNYHEKLVHKEGSRDAARKNWQTIGNIKELKEGYLSAVVHEIASLMVKHNAIVVMEDLNFGFKRGRFAVERQIYQKFENMLIEKLNYLVFKDRKVTEPGGVLNAYQLANKSAKVTDVYKQCGWLFYIPAAYTSKIDPRTGFANLFITKGLTNVEKKKEFFGKFDSIRYDATESCFVFSFDYAKICDNADYKKKWDVYTRGTRLVYNKTERKNVSVNPTEELQCVFDEFGIKWNTGEDLIESISLIPAEKSNAKFFDVLLRMFNATLQMRNSVPNTDTDYLVSPVKAEDGSFFDSREEFKKGGDARLPIDCDANGAYHIALKGLYLLLIDFNRDNKGVIQNISNKDWFKFVQEKVYKD

SEQ ID NO: 126 - protein, 1293 aa, synthetic construct
MARIIDEFCGQMNGYSRSITLRNRLVPIGKTEENLKQFLEKDLERATAYPDIKNLIDAIHRNVIEDTLSKVALNWNEIFNILATYQNEKDKKKKAAIKKDLEKLQSGARKKIVEAFKKNPDFEKLFKEGLFKELLPELIKSAPVDEIAVKTKALECFNRFSTYFTGFHDNRKNMYSEEAKSTAISYRIVNENFPKFFANIKLFNYLKEHFPRIIIDTEESLKDYLKGKKLDSVFSIDGFNSVLAQSGIDFYNTVIGGISGEAGTKKTQGLNEKINLARQQLSKEEKNKLRGKMVVLFKQILSDRETSSFIPVGFANKEEVYSTVKEFNNSIAEKAVSKVRDLFLHREEFTLNEIFVPAKSLTDFSQAIFGSWSILSEGLFLLEKDSMKKALSESQEEKINKEIAKKDCSFTELQLAYERYCTEHNLPVEKFCKDYFDIVDYRGNGAKSEKTKVSILSEILETFLQLDFDHIQDLQQEKNAAIPIKAYLDEVQNLYHHLKLVDYRGEEQKDSTFYSKHDEILTDLSQIVPLYNKVRNFVTKKLGESKKIKLNFDCPTLANGWDENQESSNDAIILRKDGKYYLGIYNPNNKPKFAKKDSIVGDCYEKMAYKQIALPMGLGAFVRKCFGTAQKYGWGCPENCLNSEGKIIIKDEEAKGNLEAIIDCYKDFLNKYEKDGFKYKDYNFSFLDSASYEKLSDFFNDVKPQGYKLSFTSIPLSEIDKMIDEGKLFLFQIYNKDFAKKATGKKNLHTLYWENLFSVENLQDVVLKLNGEAELFWREASIKKDKVIVHKKGSILVNRTTTDGKSIPEAIYQEIYQLKNKMADSISDEAKRLLESGTVVCKVATHDIVKDKHFTENTYLFHCPITMNFKAKDRTNKEFNNHVLEVLNKNPDIKVIGLDRGERHLLYLSLINQKGEIECQKTLNLVEQVRNDKTVSVNYHEKLVHKEGSRDAARKNWQTIGNIKELKEGYLSAVVHEIASLMVKHNAIVVMEDLNFGFKRGRFAVERQIYQKFENMLIEKLNYLVFKDRKVTEPGGVLNAYQLANKSAKVTDVYKQCGWLFYIPAAYTSKIDPRTGFANLFITKGLTNVEKKKEFFGKFDSIRYDATESCFVFSFDYAKICDNADYKKKWDVYTRGTSLVYNKTERKNVSVNPTEELQCVFDEFGIKWNTGEDLIESISLIPAEKSNAKFFDVLLRMFNATLQMRNSVPNTDTDYLVSPVKAEDGSFFDSREEFKKGGDARLPIDCDANGAYHIALKGLYLLLNDFNRDNKGVIQNISNKDWFKFVQEKVYKD

SEQ ID NO: 127 - DNA, 3882 bp, synthetic construct
  source 1..3882: mol_type = other DNA
atggctaggataattgatgaattttgtggacagatgaatggatacacccgttccatcacgctgcgtaaccgcctggtgccgatcggcaagaccgaggaaaatctgaaacagtttctggagaaggacttagagcgcgcaactgcgtacccggacatcaaaaacctgattgacgctatccatcgtaatgtcattgaggacaccttaagcaaagtggccctgaactggaacgaaatctttaatatcctcgcgacgtaccagaacgaaaaagataaaaagaaaaaggcggcgatcaaaaaggacctggagaagctccaaagcggtgcacgtaaaaagattgttgaggcattcaaaaagaacccggattttgaaaaactgttcaaagagggtctgtttaaagagttgctgcctgaactgatcaaaagcgcaccggttgatgaaatcgcggttaaaaccaaggcgctggaatgcttcaaccgttttagcacctatttcacgggtttccacgacaatcgcaaaaacatgtactcggaagaagctaaatctaccgcaattagctatcgcatcgtgaacgaaaatttcccgaaattttttgccaatatcaagttgttcaactatctgaaagagcactttccgcgaatcatcattgataccgaagagtccctgaaagactatttgaagggcaaaaagctggattctgtatttagcattgacggctttaacagcgtgctggcgcagagcgggattgatttctataacaccgtgataggcggtatttcaggtgaggccggcaccaaaaaaacgcagggtcttaacgagaagattaacttagcgcgccagcaattatccaaggaggagaagaacaagctgcgcggtaaaatggtggtgctgtttaaacagatcttgtctgatcgtgaaaccagcagctttatcccagtgggttttgccaacaaggaggaggtgtactctacggtgaaagaattcaacaactcgattgccgaaaaggcggtgtccaaggtgcgtgatctattcctgcaccgcgaagaattcacgctaaacgagattttcgtcccggcaaagagcttgaccgacttcagtcaggccatcttcggatcctggtctattttgagtgagggcctgttcctgctggagaaggacagcatgaaaaaggctctaagcgaatcccaagaagaaaagatcaataaggagattgcgaaaaaagactgctcctttaccgaactacaactggcgtacgagcgctactgcaccgagcacaacttgccggttgaaaaattctgcaaagactacttcgacatcgtcgattacaggggaaacggtgcgaaaagcgaaaaaacaaaagtgagcatcctgagcgaaatcctggaaacctttttacaattggactttgaccacattcaggacctgcaacaagaaaagaacgctgcgattcctatcaaagcatatcttgacgaagttcagaatttgtaccaccacctgaagttggtcgattatcgtggcgaagagcagaaagactcaaccttttatagcaaacacgatgaaatcctgaccgatctttctcagatcgtcccattgtataataaagtccgtaactttgttaccaaaaaactgggtgagagcaaaaagatcaagctgaacttcgattgcccgactctggctaatggctgggatgagaatcaagagtccagcaacgatgcaattatcctgagaaaggacggcaaatactatctgggcatttacaacccgaacaacaaaccgaaattcgcgaagaaggacagcatcgtgggtgattgctatgaaaaaatggcatacaagcaaatcgcactgccgatgggtttgggtgcatttgtgcgcaaatgctttggcaccgctcagaaatacggttggggttgcccggagaattgcctgaacagcgagggtaaaattatcatcaaagacgaggaggcgaagggtaatctggaggcaatcatcgactgttacaaagattttctgaacaagtacgaaaaggacggcttcaagtacaaggactacaatttttccttcctggactctgccagctatgaaaaactgtctgatttcttcaacgacgttaaaccgcagggctataagctgagctttacgtccatcccactgtcagagatcgataagatgattgatgaaggtaaactgtttttgtttcagatatataacaaagacttcgcgaagaaggcgacggggaagaagaacctgcataccctttattgggaaaacctattctcagtcgagaatctgcaagatgtggtgttgaagctcaatggcgaagccgagctgttctggcgtgaggctagcatcaaaaaggacaaggtgatcgttcacaaaaaaggttctattctggtgaatcgtaccaccacggatggtaagagcatcccggaggccatttatcaagaaatctatcaattaaaaaacaaaatggcggattccatcagcgacgaagcgaaacgccttctagagtccggcaccgttgtctgtaaagtcgccactcatgatatcgttaaggataaacattttactgaaaacacgtatctgttccattgtccgattaccatgaacttcaaggcaaaagaccgtaccaataaggaatttaacaatcatgttctggaggttcttaacaagaatccggatattaaggtgatcggcttagaccgtggcgaacgtcatctgctgtacctgagcctgatcaatcagaagggtgaaattgagtgccagaaaacgctgaacctagttgagcaagttcgtaatgataagaccgtttccgttaattatcatgaaaaactggtgcacaaagaaggcagccgtgatgctgcgagaaaaaactggcagaccattggcaatattaaagagctgaaggagggctacctgtcggcggtggtgcacgagattgcgagtctgatggtaaagcacaatgcgatcgttgtaatggaagacctgaatttcggctttaagcgcggtcgttttgctgtggagcgtcagatctaccaaaagttcgaaaacatgctgattgagaagctgaactatctggtttttaaagaccgtaaagtgacggagccgggtggcgttctgaacgcgtaccagttggcgaacaagagcgcgaaggtgacagatgtttataaacaatgcggttggctgttctatatcccggcagcgtacaccagcaaaattgatccgcgtaccggtttcgcgaatctgttcattaccaagggtctgaccaatgttgagaagaagaaggagtttttcggcaagttcgactcgattcgttatgatgcgaccgagtcttgtttcgttttttccttcgactacgcaaagatttgtgacaatgctgattacaagaagaaatgggatgtttacacccgtggtactcgtctcgtttacaacaagaccgaacgcaagaacgtgagcgtcaacccaaccgaagagttgcagtgtgtttttgatgagttcggcatcaagtggaataccggcgaagacctgattgaatctattagcctgatcccggcggaaaagtccaacgcgaagttcttcgacgttttgttgcgtatgtttaacgcgactcttcagatgagaaacagcgtgccgaataccgacaccgactacttggtcagcccggtgaaagctgaagacggcagctttttcgacagccgcgaggagtttaagaaaggtggcgatgcccgcctgccgatagactgcgatgctaatggtgcgtaccatattgccctgaaaggcttgtacttgttgttgaatgatttcaaccgtgataacaagggcgtcatccaaaacatctctaacaaggactggtttaaattcgtgcaggagaaagtttacaaagactaa

SEQ ID NO: 128 - DNA, 3882 bp, synthetic construct
  source 1..3882: mol_type = other DNA
atggctaggataattgatgaattttgtggacagatgaatggatacagccgttccatcacgctgcgtaaccgcctggtgccgatcggcaagaccgaggaaaatctgaaacagtttctggagaaggacttagagcgcgcaactgcgtacccggacatcaaaaacctgattgacgctatccatcgtaatgtcattgaggacaccttaagcaaagtggccctgaactggaacgaaatctttaatatcctcgcgacgtaccagaacgaaaaagataaaaagaaaaaggcggcgaccaaaaaggacctggagaagctccaaagcggtgcacgtaaaaagattgttgaggcattcaaaaagaacccggattttgaaaaactgttcaaagagggtctgtttaaagagttgctgcctgaactgatcaaaagcgcaccggttgatgaaatcgcggttaaaaccaaggcgctggaatgcttcaaccgttttagcacctatttcacgggtttccacgacaatcgcaaaaacatgtactcggaagaagctaaatctaccgcaattagctatcgcatcgtgaacgaaaatttcccgaaattttttgccaatatcaagttgttcaactatctgaaagagcactttccgcgaatcatcattgataccgaagagtccctgaaagactatttgaagggcaaaaagctggattctgtatttagcattgacggctttaacagcgtgctggcgcagagcgggattgatttctataacaccgtgataggcggtatttcaggtgaggccggcaccaaaaaaacgcagggtcttaacgagaagattaacttagcgcgccagcaattatccaaggaggagaagaacaagctgcgcggtaaaatggtggtgctgtttaaacagatcttgtctgatcgtgaaaccagcagctttatcccagtgggttttgccaacaaggaggaggtgtactctacggtgaaagaattcaacaactcgattgccgaaaaggcggtgtccaaggtgcgtgatctattcctgcaccgcgaagaattcacgctaaacgagattttcgtcccggcaaagagcttgaccgacttcagtcaggccatcttcggatcctggtctattttgagtgagggcctgttcctgctggagaaggacagcatgaaaaaggctctaagcgaatcccaagaagaaaagatcaataaggagattgcgaaaaaagactgctcctttaccgaactacaactggcgtacgagcgctactgcaccgagcacaacttgccggttgaaaaattctgcaaagactacttcgacatcgtcgattacaggggaaacggtgcgaaaagcgaaaaaacaaaagtgagcatcctgagcgaaatcctggaaacctttttacaattggactttgaccacattcaggacctgcaacaagaaaagaacgctgcgattcctatcaaagcatatcttgacgaagttcagaatttgtaccaccacctgaagttggtcgattatcgtggcgaagagcagaaagactcaaccttttatagcaaacacgatgaaatcctgaccgatctttctcagatcgtcccattgtataataaagtccgtaactttgttaccaaaaaactgggtgagagcaaaaagatcaagctgaacttcgattgcccgactctggctaatggctgggatgagaatcaagagtccagcaacgatgcaattatcctgagaaaggacggcaaatactatctgggcatttacaacccgaacaacaaaccgaaattcgcgaagaaggacagcatcgtgggtgattgctatgaaaaaatggcatacaagcaaatcgcactgccgatgggtttgggtgcatttgtgcgcaaatgctttggcaccgctcagaaatacggttggggttgcccggagaattgcctgaacagcgagggtaaaattatcatcaaagacgaggaggcgaagggtaatctggaggcaatcatcgactgttacaaagattttctgaacaagtacgaaaaggacggcttcaagtacaaggactacaatttttccttcctggactctgccagctatgaaaaactgtctgatttcttcaacgacgttaaaccgcagggctataagctgagctttacgtccatcccactgtcagagatcgataagatgattgatgaaggtaaactgtttttgtttcagatatataacaaagacttcgcgaagaaggcgacggggaagaagaacctgcataccctttattgggaaaacctattctcagtcgagaatctgcaagatgtggtgttgaagctcaatggcgaagccgagctgttctggcgtgaggctagcatcaaaaaggacaaggtgatcgttcacaaaaaaggttctattctggtgaatcgtaccaccacggatggtaagagcatcccggaggccatttatcaagaaatctatcaattaaaaaacaaaatggcggattccatcagcgacgaagcgaaacgccttctagagtccggcaccgttgtctgtaaagtcgccactcatgatatcgttaaggataaacattttactgaaaacacgtatctgttccattgtccgattaccatgaacttcaaggcaaaagaccgtaccaataaggaatttaacaatcatgttctggaggttcttaacaagaatccggatattaaggtgatcggcttagaccgtggcgaacgtcatctgctgtacctgagcctgatcaatcagaagggtgaaattgagtgccagaaaacgctgaacctagttgagcaagttcgtaatgataagaccgtttccgttaattatcatgaaaaactggtgcacaaagaaggcagccgtgatgctgcgagaaaaaactggcagaccattggcaatattaaagagctgaaggagggctacctgtcggcggtggtgcacgagattgcgagtctgatggtaaagcacaatgcgatcgttgtaatggaagacctgaatttcggctttaagcgcggtcgttttgctgtggagcgtcagatctaccaaaagttcgaaaacatgctgattgagaagctgaactatctggtttttaaagaccgtaaagtgacggagccgggtggcgttctgaacgcgtaccagttggcgaacaagagcgcgaaggtgacagatgtttataaacaatgcggttggctgttctatatcccggcagcgtacaccagcaaaattgatccgcgtaccggtttcgcgaatctgttcattaccaagggtctgaccaatgttgagaagaagaaggagtttttcggcaagttcgactcgattcgttatgatgcgaccgagtcttgtttcgttttttccttcgactacgcaaagatttgtgacaatgctgattacaagaagaaatgggatgtttacacccgtggtactcgtctcgtttacaacaagaccgaacgcaagaacgtgagcgtcaacccaaccgaagagttgcagtgtgtttttgatgagttcggcatcaagtggaataccggcgaagacctgattgaatctattagcctgatcccggcggaaaagtccaacgcgaagttcttcgacgttttgttgcgtatgtttaacgcgactcttcagatgagaaacagcgtgccgaataccgacaccgactacttggtcagcccggtgaaagctgaagacggcagctttttcgacagccgcgaggagtttaagaaaggtggcgatgcccgcctgccgatagactgcgatgctaatggtgcgtaccatattgccctgaaaggcttgtacttgttgttgaatgatttcaaccgtgataacaagggcgtcatccaaaacatctctaacaaggactggtttaaattcgtgcaggagaaagtttacaaagactaa

SEQ ID NO: 129 - DNA, 3882 bp, synthetic construct
  source 1..3882: mol_type = other DNA
atggctaggataattgatgaattttgtggacagatgaatggatacagccgttccatcacgctgcgtaaccgcctggtgccgatcggcaagaccgaggaaaatctgaaacagtttctggagaaggacttagagcgcgcaactgcgtacccggacatcaaaaacctgattgacgctatccatcgtaatgtcattgaggacaccttaagcaaagtggccctgaactggaacgaaatctttaatatcctcgcgacgtaccagaacgaaaaagataaaaagaaaaaggcggcgatcaaaaaggacctggagaagctccaaagcggtgcacgtaaaaagattgttgaggcattcaaaaagaacccggattttgaaaaactgttcaaagagggtctgtttaaagagttgctgcctgaactgatcaaaagcgcaccggttgatgaaatcgcggttaaaaccaaggcgctggaatgcttcaaccgttttagcacctatttcacgggtttccacgacaatcgcaaaaacatgtactcggaagaagctaaatctaccgcaattagctatcgcatcgtgaacgaaaatttcccgaaattttttgccaatatcaagttgttcaactatctgaaagagcactttccgctaatcatcattgataccgaagagtccctgaaagactatttgaagggcaaaaagctggattctgtatttagcattgacggctttaacagcgtgctggcgcagagcgggattgatttctataacaccgtgataggcggtatttcaggtgaggccggcaccaaaaaaacgcagggtcttaacgagaagattaacttagcgcgccagcaattatccaaggaggagaagaacaagctgcgcggtaaaatggtggtgctgtttaaacagatcttgtctgatcgtgaaaccagcagctttatcccagtgggttttgccaacaaggaggaggtgtactctacggtgaaagaattcaacaactcgattgccgaaaaggcggtgtccaaggtgcgtgatctattcctgcaccgcgaagaattcacgctaaacgagattttcgtcccggcaaagagcttgaccgacttcagtcaggccatcttcggatcctggtctattttgagtgagggcctgttcctgctggagaaggacagcatgaaaaaggctctaagcgaatcccaagaagaaaagatcaataaggagattgcgaaaaaagactgctcctttaccgaactacaactggcgtacgagcgctactgcaccgagcacaacttgccggttgaaaaattctgcaaagactacttcgacatcgtcgattacaggggaaacggtgcgaaaagcgaaaaaacaaaagtgagcatcctgagcgaaatcctggaaacctttttacaattggactttgaccacattcaggacctgcaacaagaaaagaacgctgcgattcctatcaaagcatatcttgacgaagttcagaatttgtaccaccacctgaagttggtcgattatcgtggcgaagagcagaaagactcaaccttttatagcaaacacgatgaaatcctgaccgatctttctcagatcgtcccattgtataataaagtccgtaactttgttaccaaaaaactgggtgagagcaaaaagatcaagctgaacttcgattgcccgactctggctaatggctgggatgagaatcaagagtccagcaacgatgcaattatcctgagaaaggacggcaaatactatctgggcatttacaacccgaacaacaaaccgaaattcgcgaagaaggacagcatcgtgggtgattgctatgaaaaaatggcatacaagcaaatcgcactgccgatgggtttgggtgcatttgtgcgcaaatgctttggcaccgctcagaaatacggttggggttgcccggagaattgcctgaacagcgagggtaaaattatcatcaaagacgaggaggcgaagggtaatctggaggcaatcatcgactgttacaaagattttctgaacaagtacgaaaaggacggcttcaagtacaaggactacaatttttccttcctggactctgccagctatgaaaaactgtctgatttcttcaacgacgttaaaccgcagggctataagctgagctttacgtccatcccactgtcagagatcgataagatgattgatgaaggtaaactgtttttgtttcagatatataacaaagacttcgcgaagaaggcgacggggaagaagaacctgcataccctttattgggaaaacctattctcagtcgagaatctgcaagatgtggtgttgaagctcaatggcgaagccgagctgttctggcgtgaggctagcatcaaaaaggacaaggtgatcgttcacaaaaaaggttctattctggtgaatcgtaccaccacggatggtaagagcatcccggaggccatttatcaagaaatctatcaattaaaaaacaaaatggcggattccatcagcgacgaagcgaaacgccttctagagtccggcaccgttgtctgtaaagtcgccactcatgatatcgttaaggataaacattttactgaaaacacgtatctgttccattgtccgattaccatgaacttcaaggcaaaagaccgtaccaataaggaatttaacaatcatgttctggaggttcttaacaagaatccggatattaaggtgatcggcttagaccgtggcgaacgtcatctgctgtacctgagcctgatcaatcagaagggtgaaattgagtgccagaaaacgctgaacctagttgagcaagttcgtaatgataagaccgtttccgttaattatcatgaaaaactggtgcacaaagaaggcagccgtgatgctgcgagaaaaaactggcagaccattggcaatattaaagagctgaaggagggctacctgtcggcggtggtgcacgagattgcgagtctgatggtaaagcacaatgcgatcgttgtaatggaagacctgaatttcggctttaagcgcggtcgttttgctgtggagcgtcagatctaccaaaagttcgaaaacatgctgattgagaagctgaactatctggtttttaaagaccgtaaagtgacggagccgggtggcgttctgaacgcgtaccagttggcgaacaagagcgcgaaggtgacagatgtttataaacaatgcggttggctgttctatatcccggcagcgtacaccagcaaaattgatccgcgtaccggtttcgcgaatctgttcattaccaagggtctgaccaatgttgagaagaagaaggagtttttcggcaagttcgactcgattcgttatgatgcgaccgagtcttgtttcgttttttccttcgactacgcaaagatttgtgacaatgctgattacaagaagaaatgggatgtttacacccgtggtactcgtctcgtttacaacaagaccgaacgcaagaacgtgagcgtcaacccaaccgaagagttgcagtgtgtttttgatgagttcggcatcaagtggaataccggcgaagacctgattgaatctattagcctgatcccggcggaaaagtccaacgcgaagttcttcgacgttttgttgcgtatgtttaacgcgactcttcagatgagaaacagcgtgccgaataccgacaccgactacttggtcagcccggtgaaagctgaagacggcagctttttcgacagccgcgaggagtttaagaaaggtggcgatgcccgcctgccgatagactgcgatgctaatggtgcgtaccatattgccctgaaaggcttgtacttgttgttgaatgatttcaaccgtgataacaagggcgtcatccaaaacatctctaacaaggactggtttaaattcgtgcaggagaaagtttacaaagactaa

SEQ ID NO: 130 - DNA, 3882 bp, synthetic construct
  source 1..3882: mol_type = other DNA
atggctaggataattgatgaattttgtggacagatgaatggatacagccgttccatcacgctgcgtaaccgcctggtgccgatcggcaagaccgaggaaaatctgaaacagtttctggagaaggacttagagcgcgcaactgcgtacccggacatcaaaaacctgattgacgctatccatcgtaatgtcattgaggacaccttaagcaaagtggccctgaactggaacgaaatctttaatatcctcgcgacgtaccagaacgaaaaagataaaaagaaaaaggcggcgatcaaaaaggacctggagaagctccaaagcggtgcacgtaaaaagattgttgaggcattcaaaaagaacccggattttgaaaaactgttcagagagggtctgtttaaagagttgctgcctgaactgatcaaaagcgcaccggttgatgaaatcgcggttaaaaccaaggcgctggaatgcttcaaccgttttagcacctatttcacgggtttccacgacaatcgcaaaaacatgtactcggaagaagctaaatctaccgcaattagctatcgcatcgtgaacgaaaatttcccgaaattttttgccaatatcaagttgttcaactatctgaaagagcactttccgcgaatcatcattgataccgaagagtccctgaaagactatttgaagggcaaaaagctggattctgtatttagcattgacggctttaacagcgtgctggcgcagagcgggattgatttctataacaccgtgataggcggtatttcaggtgaggccggcaccaaaaaaacgcagggtcttaacgagaagattaacttagcgcgccagcaattatccaaggaggagaagaacaagctgcgcggtaaaatggtggtgctgtttaaacagatcttgtctgatcgtgaaaccagcagctttatcccagtgggttttgccaacaaggaggaggtgtactctacggtgaaagaattcaacaactcgattgccgaaaaggcggtgtccaaggtgcgtgatctattcctgcaccgcgaagaattcacgctaaacgagattttcgtcccggcaaagagcttgaccgacttcagtcaggccatcttcggatcctggtctattttgagtgagggcctgttcctgctggagaaggacagcatgaaaaaggctctaagcgaatcccaagaagaaaagatcaataaggagattgcgaaaaaagactgctcctttaccgaactacaactggcgtacgagcgctactgcaccgagcacaacttgccggttgaaaaattctgcaaagactacttcgacatcgtcgattacaggggaaacggtgcgaaaagcgaaaaaacaaaagtgagcatcctgagcgaaatcctggaaacctttttacaattggactttgaccacattcaggacctgcaacaagaaaagaacgctgcgattcctatcaaagcatatcttgacgaagttcagaatttgtaccaccacctgaagttggtcgattatcgtggcgaagagcagaaagactcaaccttttatagcaaacacgatgaaatcctgaccgatctttctcagatcgtcccattgtataataaagtccgtaactttgttaccaaaaaactgggtgagagcaaaaagatcaagctgaacttcgattgcccgactctggctaatggctgggatgagaatcaagagtccagcaacgatgcaattatcctgagaaaggacggcaaatactatctgggcatttacaacccgaacaacaaaccgaaattcgcgaagaaggacagcatcgtgggtgattgctatgaaaaaatggcatacaagcaaatcgcactgccgatgggtttgggtgcatttgtgcgcaaatgctttggcaccgctcagaaatacggttggggttgcccggagaattgcctgaacagcgagggtaaaattatcatcaaagacgaggaggcgaagggtaatctggaggcaatcatcgactgttacaaagattttctgaacaagtacgaaaaggacggcttcaagtacaaggactacaatttttccttcctggactctgccagctatgaaaaactgtctgatttcttcaacgacgttaaaccgcagggctataagctgagctttacgtccatcccactgtcagagatcgataagatgattgatgaaggtaaactgtttttgtttcagatatataacaaagacttcgcgaagaaggcgacggggaagaagaacctgcataccctttattgggaaaacctattctcagtcgagaatctgcaagatgtggtgttgaagctcaatggcgaagccgagctgttctggcgtgaggctagcatcaaaaaggacaaggtgatcgttcacaaaaaaggttctattctggtgaatcgtaccaccacggatggtaagagcatcccggaggccatttatcaagaaatctatcaattaaaaaacaaaatggcggattccatcagcgacgaagcgaaacgccttctagagtccggcaccgttgtctgtaaagtcgccactcatgatatcgttaaggataaacattttactgaaaacacgtatctgttccattgtccgattaccatgaacttcaaggcaaaagaccgtaccaataaggaatttaacaatcatgttctggaggttcttaacaagaatccggatattaaggtgatcggcttagaccgtggcgaacgtcatctgctgtacctgagcctgatcaatcagaagggtgaaattgagtgccagaaaacgctgaacctagttgagcaagttcgtaatgataagaccgtttccgttaattatcatgaaaaactggtgcacaaagaaggcagccgtgatgctgcgagaaaaaactggcagaccattggcaatattaaagagctgaaggagggctacctgtcggcggtggtgcacgagattgcgagtctgatggtaaagcacaatgcgatcgttgtaatggaagacctgaatttcggctttaagcgcggtcgttttgctgtggagcgtcagatctaccaaaagttcgaaaacatgctgattgagaagctgaactatctggtttttaaagaccgtaaagtgacggagccgggtggcgttctgaacgcgtaccagttggcgaacaagagcgcgaaggtgacagatgtttataaacaatgcggttggctgttctatatcccggcagcgtacaccagcaaaattgatccgcgtaccggtttcgcgaatctgttcattaccaagggtctgaccaatgttgagaagaagaaggagtttttcggcaagttcgactcgattcgttatgatgcgaccgagtcttgtttcgttttttccttcgactacgcaaagatttgtgacaatgctgattacaagaagaaatgggatgtttacacccgtggtactcgtctcgtttacaacaagaccgaacgcaagaacgtgagcgtcaacccaaccgaagagttgcagtgtgtttttgatgagttcggcatcaagtggaataccggcgaagacctgattgaatctattagcctgatcccggcggaaaagtccaacgcgaagttcttcgacgttttgttgcgtatgtttaacgcgactcttcagatgagaaacagcgtgccgaataccgacaccgactacttggtcagcccggtgaaagctgaagacggcagctttttcgacagccgcgaggagtttaagaaaggtggcgatgcccgcctgccgatagactgcgatgctaatggtgcgtaccatattgccctgaaaggcttgtacttgttgttgaatgatttcaaccgtgataacaagggcgtcatccaaaacatctctaacaaggactggtttaaattcgtgcaggagaaagtttacaaagactaa

SEQ ID NO: 131 - DNA, 3882 bp, synthetic construct
  source 1..3882: mol_type = other DNA
atggctaggataattgatgaattttgtggacagatgaatggatacagccgttccatcacgctgcgtaaccgcctggtgccgatcggcaagaccgaggaaaatctgaaacagtttctggagaaggacttagagcgcgcaactgcgtacccggacatcaaaaacctgattgacgctatccatcgtaatgtcattgaggacaccttaagcaaagtggccctgaactgggacgaaatctttaatatcctcgcgacgtaccagaacgaaaaagataaaaagaaaaaggcggcgatcaaaaaggacctggagaagctccaaagcggtgcacgtaaaaagattgttgaggcattcaaaaagaacccggattttgaaaaactgttcaaagagggtctgtttaaagagttgctgcctgaactgatcaaaagcgcaccggttgatgaaatcgcggttaaaaccaaggcgctggaatgcttcaaccgttttagcacctatttcacgggtttccacgacaatcgcaaaaacatgtactcggaagaagctaaatctaccgcaattagctatcgcatcgtgaacgaaaatttcccgaaattttttgccaatatcaagttgttcaactatctgaaagagcactttccgcgaatcatcattgataccgaagagtccctgaaagactatttgaagggcaaaaagctggattctgtatttagcattgacggctttaacagcgtgctggcgcagagcgggattgatttctataacaccgtgataggcggtatttcaggtgaggccggcaccaaaaaaacgcagggtcttaacgagaagattaacttagcgcgccagcaattatccaaggaggagaagaacaagctgcgcggtaaaatggtggtgctgtttaaacagatcttgtctgatcgtgaaaccagcagctttatcccagtgggttttgccaacaaggaggaggtgtactctacggtgaaagaattcaacaactcgattgccgaaaaggcggtgtccaaggtgcgtgatctattcctgcaccgcgaagaattcacgctaaacgagattttcgtcccggcaaagagcttgaccgacttcagtcaggccatcttcggatcctggtctattttgagtgagggcctgttcctgctggagaaggacagcatgaaaaaggctctaagcgaatcccaagaagaaaagatcaataaggagattgcgaaaaaagactgctcctttaccgaactacaactggcgtacgagcgctactgcaccgagcacaacttgccggttgaaaaattctgcaaagactacttcgacatcgtcgattacaggggaaacggtgcgaaaagcgaaaaaacaaaagtgagcatcctgagcgaaatcctggaaacctttttacaattggactttgaccacattcaggacctgcaacaagaaaagaacgctgcgattcctatcaaagcatatcttgacgaagttcagaatttgtaccaccacctgaagttggtcgattatcgtggcgaagagcagaaagactcaaccttttatagcaaacacgatgaaatcctgaccgatctttctcagatcgtcccattgtataataaagtccgtaactttgttaccaaaaaactgggtgagagcaaaaagatcaagctgaacttcgattgcccgactctggctaatggctgggatgagaatcaagagtccagcaacgatgcaattatcctgagaaaggacggcaaatactatctgggcatttacaacccgaacaacaaaccgaaattcgcgaagaaggacagcatcgtgggtgattgctatgaaaaaatggcatacaagcaaatcgcactgccgatgggtttgggtgcatttgtgcgcaaatgctttggcaccgctcagaaatacggttggggttgcccggagaattgcctgaacagcgagggtaaaattatcatcaaagacgaggaggcgaagggtaatctggaggcaatcatcgactgttacaaagattttctgaacaagtacgaaaaggacggcttcaagtacaaggactacaatttttccttcctggactctgccagctatgaaaaactgtctgatttcttcaacgacgttaaaccgcagggctataagctgagctttacgtccatcccactgtcagagatcgataagatgattgatgaaggtaaactgtttttgtttcagatatataacaaagacttcgcgaagaaggcgacggggaagaagaacctgcataccctttattgggaaaacctattctcagtcgagaatctgcaagatgtggtgttgaagctcaatggcgaagccgagctgttctggcgtgaggctagcatcaaaaaggacaaggtgatcgttcacaaaaaaggttctattctggtgaatcgtaccaccacggatggtaagagcatcccggaggccatttatcaagaaatctatcaattaaaaaacaaaatggcggattccatcagcgacgaagcgaaacgccttctagagtccggcaccgttgtctgtaaagtcgccactcatgatatcgttaaggataaacattttactgaaaacacgtatctgttccattgtccgattaccatgaacttcaaggcaaaagaccgtaccaataaggaatttaacaatcatgttctggaggttcttaacaagaatccggatattaaggtgatcggcttagaccgtggcgaacgtcatctgctgtacctgagcctgatcaatcagaagggtgaaattgagtgccagaaaacgctgaacctagttgagcaagttcgtaatgataagaccgtttccgttaattatcatgaaaaactggtgcacaaagaaggcagccgtgatgctgcgagaaaaaactggcagaccattggcaatattaaagagctgaaggagggctacctgtcggcggtggtgcacgagattgcgagtctgatggtaaagcacaatgcgatcgttgtaatggaagacctgaatttcggctttaagcgcggtcgttttgctgtggagcgtcagatctaccaaaagttcgaaaacatgctgattgagaagctgaactatctggtttttaaagaccgtaaagtgacggagccgggtggcgttctgaacgcgtaccagttggcgaacaagagcgcgaaggtgacagatgtttataaacaatgcggttggctgttctatatcccggcagcgtacaccagcaaaattgatccgcgtaccggtttcgcgaatctgttcattaccaagggtctgaccaatgttgagaagaagaaggagtttttcggcaagttcgactcgattcgttatgatgcgaccgagtcttgtttcgttttttccttcgactacgcaaagatttgtgacaatgctgattacaagaagaaatgggatgtttacacccgtggtactcgtctcgtttacaacaagaccgaacgcaagaacgtgagcgtcaacccaaccgaagagttgcagtgtgtttttgatgagttcggcatcaagtggaataccggcgaagacctgattgaatctattagcctgatcccggcggaaaagtccaacgcgaagttcttcgacgttttgttgcgtatgtttaacgcgactcttcagatgagaaacagcgtgccgaataccgacaccgactacttggtcagcccggtgaaagctgaagacggcagctttttcgacagccgcgaggagtttaagaaaggtggcgatgcccgcctgccgatagactgcgatgctaatggtgcgtaccatattgccctgaaaggcttgtacttgttgttgaatgatttcaaccgtgataacaagggcgtcatccaaaacatctctaacaaggactggtttaaattcgtgcaggagaaagtttacaaagactaa

SEQ ID NO: 132 - DNA, 3882 bp, synthetic construct
  source 1..3882: mol_type = other DNA
atggctaggataattgatgaattttgtggacagatgaatggatacagccgttccatcacgctgcgtaaccgcctggtgccgatcggcaagaccgaggaaaatctgaaacagtttctggagaaggacttagagcgcgcaactgcgtacccggacatcaaaaacctgattgacgctatccatcgtaatgtcattgaggacaccttaagcaaagtggccctgaactggaacgaaatctttaatatcctcgcgacgtaccagaacgaaaaagataaaaagaaaaaggcggcgatcaaaaaggacctggagaagctccaaagcggtgcacgtaaaaagattgttgaggcattcaaaaagaacccggattttgaaaaactgttcaaagagggtctgtttaaagagttgctgcctgaactgatcaaaagcgcaccggttgatgaaatcgcggttaaaaccaaggcgctggaatgcttcaaccgttttagcacctatttcacgggtttccacgacaatcgcaaaaacatgtactcggaagaagctaaatctaccgcaattagctatcgcatcgtgaacgaaaatttcccgaaattttttgccaatatcaagttgttcaactatctgaaagagcactttccgcgaatcatcattgataccgaagagtccctgaaagactatttgaagggcaaaaagctggattctgtatttagcattgacggctttaacagcgtgctggcgcagagcgggattgatttctataacaccgtgataggcggtatttcaggtgaggccggcaccaaaaaaacgcagggtcttaacgagaagattaacttagcgcgccagcaattatccaaggaggagaagaacaagctgcgcggtaaaatggtggtgctgtttaaacagatcttgtctgatagtgaaaccagcagctttatcccagtgggttttgccaacaaggaggaggtgtactctacggtgaaagaattcaacaactcgattgccgaaaaggcggtgtccaaggtgcgtgatctattcctgcaccgcgaagaattcacgctaaacgagattttcgtcccggcaaagagcttgaccgacttcagtcaggccatcttcggatcctggtctattttgagtgagggcctgttcctgctggagaaggacagcatgaaaaaggctctaagcgaatcccaagaagaaaagatcaataaggagattgcgaaaaaagactgctcctttaccgaactacaactggcgtacgagcgctactgcaccgagcacaacttgccggttgaaaaattctgcaaagactacttcgacatcgtcgattacaggggaaacggtgcgaaaagcgaaaaaacaaaagtgagcatcctgagcgaaatcctggaaacctttttacaattggactttgaccacattcaggacctgcaacaagaaaagaacgctgcgattcctatcaaagcatatcttgacgaagttcagaatttgtaccaccacctgaagttggtcgattatcgtggcgaagagcagaaagactcaaccttttatagcaaacacgatgaaatcctgaccgatctttctcagatcgtcccattgtataataaagtccgtaactttgttaccaaaaaactgggtgagagcaaaaagatcaagctgaacttcgattgcccgactctggctaatggctgggatgagaatcaagagtccagcaacgatgcaattatcctgagaaaggacggcaaatactatctgggcatttacaacccgaacaacaaaccgaaattcgcgaagaaggacagcatcgtgggtgattgctatgaaaaaatggcatacaagcaaatcgcactgccgatgggtttgggtgcatttgtgcgcaaatgctttggcaccgctcagaaatacggttggggttgcccggagaattgcctgaacagcgagggtaaaattatcatcaaagacgaggaggcgaagggtaatctggaggcaatcatcgactgttacaaagattttctgaacaagtacgaaaaggacggcttcaagtacaaggactacaatttttccttcctggactctgccagctatgaaaaactgtctgatttcttcaacgacgttaaaccgcagggctataagctgagctttacgtccatcccactgtcagagatcgataagatgattgatgaaggtaaactgtttttgtttcagatatataacaaagacttcgcgaagaaggcgacggggaagaagaacctgcataccctttattgggaaaacctattctcagtcgagaatctgcaagatgtggtgttgaagctcaatggcgaagccgagctgttctggcgtgaggctagcatcaaaaaggacaaggtgatcgttcacaaaaaaggttctattctggtgaatcgtaccaccacggatggtaagagcatcccggaggccatttatcaagaaatctatcaattaaaaaacaaaatggcggattccatcagcgacgaagcgaaacgccttctagagtccggcaccgttgtctgtaaagtcgccactcatgatatcgttaaggataaacattttactgaaaacacgtatctgttccattgtccgattaccatgaacttcaaggcaaaagaccgtaccaataaggaatttaacaatcatgttctggaggttcttaacaagaatccggatattaaggtgatcggcttagaccgtggcgaacgtcatctgctgtacctgagcctgatcaatcagaagggtgaaattgagtgccagaaaacgctgaacctagttgagcaagttcgtaatgataagaccgtttccgttaattatcatgaaaaactggtgcacaaagaaggcagccgtgatgctgcgagaaaaaactggcagaccattggcaatattaaagagctgaaggagggctacctgtcggcggtggtgcacgagattgcgagtctgatggtaaagcacaatgcgatcgttgtaatggaagacctgaatttcggctttaagcgcggtcgttttgctgtggagcgtcagatctaccaaaagttcgaaaacatgctgattgagaagctgaactatctggtttttaaagaccgtaaagtgacggagccgggtggcgttctgaacgcgtaccagttggcgaacaagagcgcgaaggtgacagatgtttataaacaatgcggttggctgttctatatcccggcagcgtacaccagcaaaattgatccgcgtaccggtttcgcgaatctgttcattaccaagggtctgaccaatgttgagaagaagaaggagtttttcggcaagttcgactcgattcgttatgatgcgaccgagtcttgtttcgttttttccttcgactacgcaaagatttgtgacaatgctgattacaagaagaaatgggatgtttacacccgtggtactcgtctcgtttacaacaagaccgaacgcaagaacgtgagcgtcaacccaaccgaagagttgcagtgtgtttttgatgagttcggcatcaagtggaataccggcgaagacctgattgaatctattagcctgatcccggcggaaaagtccaacgcgaagttcttcgacgttttgttgcgtatgtttaacgcgactcttcagatgagaaacagcgtgccgaataccgacaccgactacttggtcagcccggtgaaagctgaagacggcagctttttcgacagccgcgaggagtttaagaaaggtggcgatgcccgcctgccgatagactgcgatgctaatggtgcgtaccatattgccctgaaaggcttgtacttgttgttgaatgatttcaaccgtgataacaagggcgtcatccaaaacatctctaacaaggactggtttaaattcgtgcaggagaaagtttacaaagactaa

SEQ ID NO: 133 - DNA, 3882 bp, synthetic construct
  source 1..3882: mol_type = other DNA
atggctaggataattgatgaattttgtggacagatgaatggatacagccgttccatcacgctgcgtaaccgcctggtgccgatcggcaagaccgaggaaaatctgaaacagtttctggagaaggacttagagcgcgcaactgcgtacccggacatcaaaaacctgattgacgctatccatcgtaatgtcattgaggacaccttaagcaaagtggccctgaactggaacgaaatctttaatatcctcgcgacgtaccagaacgaaaaagataaaaagaaaaaggcggcgatcaaaaaggacctggagaagctccaaagcggtgcacgtaaaaagattgttgaggcattcaaaaagaacccggattttgaaaaactgttcaaagagggtctgtttaaagagttgctgcctgaactgatcaaaagcgcaccggttgatgaaatcgcggttaaaaccaaggcgctggaatgcttcaaccgttttagcacctatttcacgggtttccacgacaatcgcaaaaacatgtactcggaagaagctaaatctaccgcaattagctatcgcatcgtgaacgaaaatttcccgaaattttttgccaatatcaagttgttcaactatctgaaagagcactttccgcgaatcatcattgataccgaagagtccctgaaagactatttgaagggcaaaaagctggattctgtatttagcattgacggctttaacagcgtgctggcgcagagcgggattgatttctataacaccatgataggcggtatttcaggtgaggccggcaccaaaaaaacgcagggtcttaacgagaagattaacttagcgcgccagcaattatccaaggaggagaagaacaagctgcgcggtaaaatggtggtgctgtttaaacagatcttgtctgatcgtgaaaccagcagctttatcccagtgggttttgccaacaaggaggaggtgtactctacggtgaaagaattcaacaactcgattgccgaaaaggcggtgtccaaggtgcgtgatctattcctgcaccgcgaagaattcacgctaaacgagattttcgtcccggcaaagagcttgaccgacttcagtcaggccatcttcggatcctggtctattttgagtgagggcctgttcctgctggagaaggacagcatgaaaaaggctctaagcgaatcccaagaagaaaagatcaataaggagattgcgaaaaaagactgctcctttaccgaactacaactggcgtacgagcgctactgcaccgagcacaacttgccggttgaaaaattctgcaaagactacttcgacatcgtcgattacaggggaaacggtgcgaaaagcgaaaaaacaaaagtgagcatcctgagcgaaatcctggaaacctttttacaattggactttgaccacattcaggacctgcaacaagaaaagaacgctgcgattcctatcaaagcatatcttgacgaagttcagaatttgtaccaccacctgaagttggtcgattatcgtggcgaagagcagaaagactcaaccttttatagcaaacacgatgaaatcctgaccgatctttctcagatcgtcccattgtataataaagtccgtaactttgttaccaaaaaactgggtgagagcaaaaagatcaagctgaacttcgattgcccgactctggctaatggctgggatgagaatcaagagtccagcaacgatgcaattatcctgagaaaggacggcaaatactatctgggcatttacaacccgaacaacaaaccgaaattcgcgaagaaggacagcatcgtgggtgattgctatgaaaaaatggcatacaagcaaatcgcactgccgatgggtttgggtgcatttgtgcgcaaatgctttggcaccgctcagaaatacggttggggttgcccggagaattgcctgaacagcgagggtaaaattatcatcaaagacgaggaggcgaagggtaatctggaggcaatcatcgactgttacaaagattttctgaacaagtacgaaaaggacggcttcaagtacaaggactacaatttttccttcctggactctgccagctatgaaaaactgtctgatttcttcaacgacgttaaaccgcagggctataagctgagctttacgtccatcccactgtcagagatcgataagatgattgatgaaggtaaactgtttttgtttcagatatataacaaagacttcgcgaagaaggcgacggggaagaagaacctgcataccctttattgggaaaacctattctcagtcgagaatctgcaagatgtggtgttgaagctcaatggcgaagccgagctgttctggcgtgaggctagcatcaaaaaggacaaggtgatcgttcacaaaaaaggttctattctggtgaatcgtaccaccacggatggtaagagcatcccggaggccatttatcaagaaatctatcaattaaaaaacaaaatggcggattccatcagcgacgaagcgaaacgccttctagagtccggcaccgttgtctgtaaagtcgccactcatgatatcgttaaggataaacattttactgaaaacacgtatctgttccattgtccgattaccatgaacttcaaggcaaaagaccgtaccaataaggaatttaacaatcatgttctggaggttcttaacaagaatccggatattaaggtgatcggcttagaccgtggcgaacgtcatctgctgtacctgagcctgatcaatcagaagggtgaaattgagtgccagaaaacgctgaacctagttgagcaagttcgtaatgataagaccgtttccgttaattatcatgaaaaactggtgcacaaagaaggcagccgtgatgctgcgagaaaaaactggcagaccattggcaatattaaagagctgaaggagggctacctgtcggcggtggtgcacgagattgcgagtctgatggtaaagcacaatgcgatcgttgtaatggaagacctgaatttcggctttaagcgcggtcgttttgctgtggagcgtcagatctaccaaaagttcgaaaacatgctgattgagaagctgaactatctggtttttaaagaccgtaaagtgacggagccgggtggcgttctgaacgcgtaccagttggcgaacaagagcgcgaaggtgacagatgtttataaacaatgcggttggctgttctatatcccggcagcgtacaccagcaaaattgatccgcgtaccggtttcgcgaatctgttcattaccaagggtctgaccaatgttgagaagaagaaggagtttttcggcaagttcgactcgattcgttatgatgcgaccgagtcttgtttcgttttttccttcgactacgcaaagatttgtgacaatgctgattacaagaagaaatgggatgtttacacccgtggtactcgtctcgtttacaacaagaccgaacgcaagaacgtgagcgtcaacccaaccgaagagttgcagtgtgtttttgatgagttcggcatcaagtggaataccggcgaagacctgattgaatctattagcctgatcccggcggaaaagtccaacgcgaagttcttcgacgttttgttgcgtatgtttaacgcgactcttcagatgagaaacagcgtgccgaataccgacaccgactacttggtcagcccggtgaaagctgaagacggcagctttttcgacagccgcgaggagtttaagaaaggtggcgatgcccgcctgccgatagactgcgatgctaatggtgcgtaccatattgccctgaaaggcttgtacttgttgttgaatgatttcaaccgtgataacaagggcgtcatccaaaacatctctaacaaggactggtttaaattcgtgcaggagaaagtttacaaagactaa

SEQ ID NO: 134 - DNA, 3882 bp, synthetic construct
  source 1..3882: mol_type = other DNA
atggctaggataattgatgaattttgtggacagatgaatggatacagccgttccatcacgctgcgtaaccgcctggtgccgatcggcaagaccgaggaaaatctgaaacagtttctggagaaggacttagagcgcgcaactgcgtacccggacatcaaaaacctgattgacgctatccatcgtaatgtcattgaggacaccttaagcaaagtggccctgaactggaacgaaatctttaatatcctcgcgacgtaccagaacgaaaaagataaaaagaaaaaggcggcgatcaaaaaggacctggagaagctccaaagcggtgcacgtaaaaagattgttgaggcattcaaaaagaacccggattttgaaaaactgttcaaagagggtctgtttaaagagttgctgcctgaactgatcaaaagcgcaccggttgatgaaatcgcggttaaaaccaaggcgctggaatgcttcaaccgttttagcacctatttcacgggtttccacgacaatcgcaaaaacatgtactcggaagaagctaaatctaccgcaattagctatcgcatcgtgaacgaaaatttcccgaaattttttgccaatatcaagttgttcaactatctgaaagagcactttccgcgaatcatcattgataccgaagagtccctgaaagactatttgaagggcaaaaagctggtttctgtatttagcattgacggctttaacagcgtgctggcgcagagcgggattgatttctataacaccgtgataggcggtatttcaggtgaggccggcaccaaaaaaacgcagggtcttaacgagaagattaacttagcgcgccagcaattatccaaggaggagaagaacaagctgcgcggtaaaatggtggtgctgtttaaacagatcttgtctgatcgtgaaaccagcagctttatcccagtgggttttgccaacaaggaggaggtgtactctacggtgaaagaattcaacaactcgattgccgaaaaggcggtgtccaaggtgcgtgatctattcctgcaccgcgaagaattcacgctaaacgagattttcgtcccggcaaagagcttgaccgacttcagtcaggccatcttcggatcctggtctattttgagtgagggcctgttcctgctggagaaggacagcatgaaaaaggctctaagcgaatcccaagaagaaaagatcaataaggagattgcgaaaaaagactgctcctttaccgaactacaactggcgtacgagcgctactgcaccgagcacaacttgccggttgaaaaattctgcaaagactacttcgacatcgtcgattacaggggaaacggtgcgaaaagcgaaaaaacaaaagtgagcatcctgagcgaaatcctggaaacctttttacaattggactttgaccacattcaggacctgcaacaagaaaagaacgctgcgattcctatcaaagcatatcttgacgaagttcagaatttgtaccaccacctgaagttggtcgattatcgtggcgaagagcagaaagactcaaccttttatagcaaacacgatgaaatcctgaccgatctttctcagatcgtcccattgtataataaagtccgtaactttgttaccaaaaaactgggtgagagcaaaaagatcaagctgaacttcgattgcccgactctggctaatggctgggatgagaatcaagagtccagcaacgatgcaattatcctgagaaaggacggcaaatactatctgggcatttacaacccgaacaacaaaccgaaattcgcgaagaaggacagcatcgtgggtgattgctatgaaaaaatggcatacaagcaaatcgcactgccgatgggtttgggtgcatttgtgcgcaaatgctttggcaccgctcagaaatacggttggggttgcccggagaattgcctgaacagcgagggtaaaattatcatcaaagacgaggaggcgaagggtaatctggaggcaatcatcgactgttacaaagattttctgaacaagtacgaaaaggacggcttcaagtacaaggactacaatttttccttcctggactctgccagctatgaaaaactgtctgatttcttcaacgacgttaaaccgcagggctataagctgagctttacgtccatcccactgtcagagatcgataagatgattgatgaaggtaaactgtttttgtttcagatatataacaaagacttcgcgaagaaggcgacggggaagaagaacctgcataccctttattgggaaaacctattctcagtcgagaatctgcaagatgtggtgttgaagctcaatggcgaagccgagctgttctggcgtgaggctagcatcaaaaaggacaaggtgatcgttcacaaaaaaggttctattctggtgaatcgtaccaccacggatggtaagagcatcccggaggccatttatcaagaaatctatcaattaaaaaacaaaatggcggattccatcagcgacgaagcgaaacgccttctagagtccggcaccgttgtctgtaaagtcgccactcatgatatcgttaaggataaacattttactgaaaacacgtatctgttccattgtccgattaccatgaacttcaaggcaaaagaccgtaccaataaggaatttaacaatcatgttctggaggttcttaacaagaatccggatattaaggtgatcggcttagaccgtggcgaacgtcatctgctgtacctgagcctgatcaatcagaagggtgaaattgagtgccagaaaacgctgaacctagttgagcaagttcgtaatgataagaccgtttccgttaattatcatgaaaaactggtgcacaaagaaggcagccgtgatgctgcgagaaaaaactggcagaccattggcaatattaaagagctgaaggagggctacctgtcggcggtggtgcacgagattgcgagtctgatggtaaagcacaatgcgatcgttgtaatggaagacctgaatttcggctttaagcgcggtcgttttgctgtggagcgtcagatctaccaaaagttcgaaaacatgctgattgagaagctgaactatctggtttttaaagaccgtaaagtgacggagccgggtggcgttctgaacgcgtaccagttggcgaacaagagcgcgaaggtgacagatgtttataaacaatgcggttggctgttctatatcccggcagcgtacaccagcaaaattgatccgcgtaccggtttcgcgaatctgttcattaccaagggtctgaccaatgttgagaagaagaaggagtttttcggcaagttcgactcgattcgttatgatgcgaccgagtcttgtttcgttttttccttcgactacgcaaagatttgtgacaatgctgattacaagaagaaatgggatgtttacacccgtggtactcgtctcgtttacaacaagaccgaacgcaagaacgtgagcgtcaacccaaccgaagagttgcagtgtgtttttgatgagttcggcatcaagtggaataccggcgaagacctgattgaatctattagcctgatcccggcggaaaagtccaacgcgaagttcttcgacgttttgttgcgtatgtttaacgcgactcttcagatgagaaacagcgtgccgaataccgacaccgactacttggtcagcccggtgaaagctgaagacggcagctttttcgacagccgcgaggagtttaagaaaggtggcgatgcccgcctgccgatagactgcgatgctaatggtgcgtaccatattgccctgaaaggcttgtacttgttgttgaatgatttcaaccgtgataacaagggcgtcatccaaaacatctctaacaaggactggtttaaattcgtgcaggagaaagtttacaaagactaa

SEQ ID NO: 135 - DNA, 3882 bp, synthetic construct
  source 1..3882: mol_type = other DNA
atggctaggataattgatgaattttgtggacagatgaatggatacagccgttccatcacgctgcgtaaccgcctggtgccgttcggcaagaccgaggaaaatctgaaacagtttctggagaaggacttagagcgcgcaactgcgtacccggacatcaaaaacctgattgacgctatccatcgtaatgtcattgaggacaccttaagcaaagtggccctgaactggaacgaaatctttaatatcctcgcgacgtaccagaacgaaaaagataaaaagaaaaaggcggcgatcaaaaaggacctggagaagctccaaagcggtgcacgtaaaaagattgttgaggcattcaaaaagaacccggattttgaaaaactgttcaaagagggtctgtttaaagagttgctgcctgaactgatcaaaagcgcaccggttgatgaaatcgcggttaaaaccaaggcgctggaatgcttcaaccgttttagcacctatttcacgggtttccacgacaatcgcaaaaacatgtactcggaagaagctaaatctaccgcaattagctatcgcatcgtgaacgaaaatttcccgaaattttttgccaatatcaagttgttcaactatctgaaagagcactttccgcgaatcatcattgataccgaagagtccctgaaagactatttgaagggcaaaaagctggattctgtatttagcattgacggctttaacagcgtgctggcgcagagcgggattgatttctataacaccgtgataggcggtatttcaggtgaggccggcaccaaaaaaacgcagggtcttaacgagaagattaacttagcgcgccagcaattatccaaggaggagaagaacaagctgcgcggtaaaatggtggtgctgtttaaacagatcttgtctgatcgtgaaaccagcagctttatcccagtgggttttgccaacaaggaggaggtgtactctacggtgaaagaattcaacaactcgattgccgaaaaggcggtgtccaaggtgcgtgatctattcctgcaccgcgaagaattcacgctaaacgagattttcgtcccggcaaagagcttgaccgacttcagtcaggccatcttcggatcctggtctattttgagtgagggcctgttcctgctggagaaggacagcatgaaaaaggctctaagcgaatcccaagaagaaaagatcaataaggagattgcgaaaaaagactgctcctttaccgaactacaactggcgtacgagcgctactgcaccgagcacaacttgccggttgaaaaattctgcaaagactacttcgacatcgtcgattacaggggaaacggtgcgaaaagcgaaaaaacaaaagtgagcatcctgagcgaaatcctggaaacctttttacaattggactttgaccacattcaggacctgcaacaagaaaagaacgctgcgattcctatcaaagcatatcttgacgaagttcagaatttgtaccaccacctgaagttggtcgattatcgtggcgaagagcagaaagactcaaccttttatagcaaacacgatgaaatcctgaccgatctttctcagatcgtcccattgtataataaagtccgtaactttgttaccaaaaaactgggtgagagcaaaaagatcaagctgaacttcgattgcccgactctggctaatggctgggatgagaatcaagagtccagcaacgatgcaattatcctgagaaaggacggcaaatactatctgggcatttacaacccgaacaacaaaccgaaattcgcgaagaaggacagcatcgtgggtgattgctatgaaaaaatggcatacaagcaaatcgcactgccgatgggtttgggtgcatttgtgcgcaaatgctttggcaccgctcagaaatacggttggggttgcccggagaattgcctgaacagcgagggtaaaattatcatcaaagacgaggaggcgaagggtaatctggaggcaatcatcgactgttacaaagattttctgaacaagtacgaaaaggacggcttcaagtacaaggactacaatttttccttcctggactctgccagctatgaaaaactgtctgatttcttcaacgacgttaaaccgcagggctataagctgagctttacgtccatcccactgtcagagatcgataagatgattgatgaaggtaaactgtttttgtttcagatatataacaaagacttcgcgaagaaggcgacggggaagaagaacctgcataccctttattgggaaaacctattctcagtcgagaatctgcaagatgtggtgttgaagctcaatggcgaagccgagctgttctggcgtgaggctagcatcaaaaaggacaaggtgatcgttcacaaaaaaggttctattctggtgaatcgtaccaccacggatggtaagagcatcccggaggccatttatcaagaaatctatcaattaaaaaacaaaatggcggattccatcagcgacgaagcgaaacgccttctagagtccggcaccgttgtctgtaaagtcgccactcatgatatcgttaaggataaacattttactgaaaacacgtatctgttccattgtccgattaccatgaacttcaaggcaaaagaccgtaccaataaggaatttaacaatcatgttctggaggttcttaacaagaatccggatattaaggtgatcggcttagaccgtggcgaacgtcatctgctgtacctgagcctgatcaatcagaagggtgaaattgagtgccagaaaacgctgaacctagttgagcaagttcgtaatgataagaccgtttccgttaattatcatgaaaaactggtgcacaaagaaggcagccgtgatgctgcgagaaaaaactggcagaccattggcaatattaaagagctgaaggagggctacctgtcggcggtggtgcacgagattgcgagtctgatggtaaagcacaatgcgatcgttgtaatggaagacctgaatttcggctttaagcgcggtcgttttgctgtggagcgtcagatctaccaaaagttcgaaaacatgctgattgagaagctgaactatctggtttttaaagaccgtaaagtgacggagccgggtggcgttctgaacgcgtaccagttggcgaacaagagcgcgaaggtgacagatgtttataaacaatgcggttggctgttctatatcccggcagcgtacaccagcaaaattgatccgcgtaccggtttcgcgaatctgttcattaccaagggtctgaccaatgttgagaagaagaaggagtttttcggcaagttcgactcgattcgttatgatgcgaccgagtcttgtttcgttttttccttcgactacgcaaagatttgtgacaatgctgattacaagaagaaatgggatgtttacacccgtggtactcgtctcgtttacaacaagaccgaacgcaagaacgtgagcgtcaacccaaccgaagagttgcagtgtgtttttgatgagttcggcatcaagtggaataccggcgaagacctgattgaatctattagcctgatcccggcggaaaagtccaacgcgaagttcttcgacgttttgttgcgtatgtttaacgcgactcttcagatgagaaacagcgtgccgaataccgacaccgactacttggtcagcccggtgaaagctgaagacggcagctttttcgacagccgcgaggagtttaagaaaggtggcgatgcccgcctgccgatagactgcgatgctaatggtgcgtaccatattgccctgaaaggcttgtacttgttgttgaatgatttcaaccgtgataacaagggcgtcatccaaaacatctctaacaaggactggtttaaattcgtgcaggagaaagtttacaaagactaa

SEQ ID NO: 136 - DNA, 3882 bp, synthetic construct
  source 1..3882: mol_type = other DNA
atggctaggataattgatgaattttgtggacagatgaatggatacagccgttccatcacgctgcgtaaccgcctggtgccgatcggcaagaccgaggaaaatctgaaacagtttctggagaaggacttagagcgcgcaactgcgtacccggacatcaaaaacctgattgacgctatccatcgtaatgtcattgaggacaccttaagcaaagtggccctgaactggaacgaaatctttaatatcctcgcgacgtaccagaacgaaaaagataaaaagaaaaaggcggcgatcaaaaaggacctggagaagctccaaagcggtgcacgtaaaaagattgttgaggcattcaaaaagaacccggattttgaaaaactgttcaaagagggtctgtttaaagagttgctgcctgaactgatcaaaagcgcaccggttgatgaaatcgcggttaaaaccaaggcgctggaatgcttcaaccgttttagcacctatttcacgggtttccacgacaatcgcaaaaacatgtactcggaagaagctaaatctaccacaattagctatcgcatcgtgaacgaaaatttcccgaaattttttgccaatatcaagttgttcaactatctgaaagagcactttccgcgaatcatcattgataccgaagagtccctgaaagactatttgaagggcaaaaagctggattctgtatttagcattgacggctttaacagcgtgctggcgcagagcgggattgatttctataacaccgtgataggcggtatttcaggtgaggccggcaccaaaaaaacgcagggtcttaacgagaagattaacttagcgcgccagcaattatccaaggaggagaagaacaagctgcgcggtaaaatggtggtgctgtttaaacagatcttgtctgatcgtgaaaccagcagctttatcccagtgggttttgccaacaaggaggaggtgtactctacggtgaaagaattcaacaactcgattgccgaaaaggcggtgtccaaggtgcgtgatctattcctgcaccgcgaagaattcacgctaaacgagattttcgtcccggcaaagagcttgaccgacttcagtcaggccatcttcggatcctggtctattttgagtgagggcctgttcctgctggagaaggacagcatgaaaaaggctctaagcgaatcccaagaagaaaagatcaataaggagattgcgaaaaaagactgctcctttaccgaactacaactggcgtacgagcgctactgcaccgagcacaacttgccggttgaaaaattctgcaaagactacttcgacatcgtcgattacaggggaaacggtgcgaaaagcgaaaaaacaaaagtgagcatcctgagcgaaatcctggaaacctttttacaattggactttgaccacattcaggacctgcaacaagaaaagaacgctgcgattcctatcaaagcatatcttgacgaagttcagaatttgtaccaccacctgaagttggtcgattatcgtggcgaagagcagaaagactcaaccttttatagcaaacacgatgaaatcctgaccgatctttctcagatcgtcccattgtataataaagtccgtaactttgttaccaaaaaactgggtgagagcaaaaagatcaagctgaacttcgattgcccgactctggctaatggctgggatgagaatcaagagtccagcaacgatgcaattatcctgagaaaggacggcaaatactatctgggcatttacaacccgaacaacaaaccgaaattcgcgaagaaggacagcatcgtgggtgattgctatgaaaaaatggcatacaagcaaatcgcactgccgatgggtttgggtgcatttgtgcgcaaatgctttggcaccgctcagaaatacggttggggttgcccggagaattgcctgaacagcgagggtaaaattatcatcaaagacgaggaggcgaagggtaatctggaggcaatcatcgactgttacaaagattttctgaacaagtacgaaaaggacggcttcaagtacaaggactacaatttttccttcctggactctgccagctatgaaaaactgtctgatttcttcaacgacgttaaaccgcagggctataagctgagctttacgtccatcccactgtcagagatcgataagatgattgatgaaggtaaactgtttttgtttcagatatataacaaagacttcgcgaagaaggcgacggggaagaagaacctgcataccctttattgggaaaacctattctcagtcgagaatctgcaagatgtggtgttgaagctcaatggcgaagccgagctgttctggcgtgaggctagcatcaaaaaggacaaggtgatcgttcacaaaaaaggttctattctggtgaatcgtaccaccacggatggtaagagcatcccggaggccatttatcaagaaatctatcaattaaaaaacaaaatggcggattccatcagcgacgaagcgaaacgccttctagagtccggcaccgttgtctgtaaagtcgccactcatgatatcgttaaggataaacattttactgaaaacacgtatctgttccattgtccgattaccatgaacttcaaggcaaaagaccgtaccaataaggaatttaacaatcatgttctggaggttcttaacaagaatccggatattaaggtgatcggcttagaccgtggcgaacgtcatctgctgtacctgagcctgatcaatcagaagggtgaaattgagtgccagaaaacgctgaacctagttgagcaagttcgtaatgataagaccgtttccgttaattatcatgaaaaactggtgcacaaagaaggcagccgtgatgctgcgagaaaaaactggcagaccattggcaatattaaagagctgaaggagggctacctgtcggcggtggtgcacgagattgcgagtctgatggtaaagcacaatgcgatcgttgtaatggaagacctgaatttcggctttaagcgcggtcgttttgctgtggagcgtcagatctaccaaaagttcgaaaacatgctgattgagaagctgaactatctggtttttaaagaccgtaaagtgacggagccgggtggcgttctgaacgcgtaccagttggcgaacaagagcgcgaaggtgacagatgtttataaacaatgcggttggctgttctatatcccggcagcgtacaccagcaaaattgatccgcgtaccggtttcgcgaatctgttcattaccaagggtctgaccaatgttgagaagaagaaggagtttttcggcaagttcgactcgattcgttatgatgcgaccgagtcttgtttcgttttttccttcgactacgcaaagatttgtgacaatgctgattacaagaagaaatgggatgtttacacccgtggtactcgtctcgtttacaacaagaccgaacgcaagaacgtgagcgtcaacccaaccgaagagttgcagtgtgtttttgatgagttcggcatcaagtggaataccggcgaagacctgattgaatctattagcctgatcccggcggaaaagtccaacgcgaagttcttcgacgttttgttgcgtatgtttaacgcgactcttcagatgagaaacagcgtgccgaataccgacaccgactacttggtcagcccggtgaaagctgaagacggcagctttttcgacagccgcgaggagtttaagaaaggtggcgatgcccgcctgccgatagactgcgatgctaatggtgcgtaccatattgccctgaaaggcttgtacttgttgttgaatgatttcaaccgtgataacaagggcgtcatccaaaacatctctaacaaggactggtttaaattcgtgcaggagaaagtttacaaagactaa

SEQ ID NO: 137 - DNA, 3882 bp, synthetic construct
  source 1..3882: mol_type = other DNA
atggctaggataattgatgaattttgtggacagatgaatggatacagccgttccatcacgctgcgtaaccgcctggtgccgatcggcaagaccgaggaaaatctgaaacagtttctggagaaggacttagagcgcgcaactgcgtacccggacatcaaaaacctgattgacgctatccatcgtaatgtcattgaggacaccttaagcaaagtggccctgaactggaacgaaatctttaatatcctcgcgacgtaccagaacgaaaaagataaaaagaaaaaggcggcgatcaaaaaggacctggagaagctccaaagcggtgcacgtaaaaagattgttgaggcattcaaaaagaacccggattttgaaaaactgttcaaagagggtctgtttaaagagttgctgcctgaactgatcaaaagcgcaccggttgatgaaatcgcggttaaaaccaaggcgctggaatgcttcaaccgttttagcacctatttcacgggtttccacgacaatcgcaaaaacatgtactcggaagaagctaaatctaccgcaattagctatcgcatcgtgaacgaaaatttcccgaaattttttgccaatatcaagttgttcaactatctgaaagagcactttccgcgaatcatcattgataccgaagagtccctgaaagactatttgaagggcaaaaagctggattctgtatttagcattgacggctttaacagcgtgctggcgcagagcgggattgatttctataacaccgtgataggcggtatttcaggtgaggccggcaccaaaaaaacgcagggtcttaacgagaagattaacttagcgcgccagcaattatccaaggaggagaagaacaagctgcgcggtaaaatggtggtgctgtttaaacagatcttgtctgatcgtgaaaccagcagctttatcccagtgggttttgccaacaaggaggaggtgtactctacggtgaaagaattcaacaactcgattgccgaaaaggcggtgtccaaggtgcgtgttctattcctgcaccgcgaagaattcacgctaaacgagattttcgtcccggcaaagagcttgaccgacttcagtcaggccatcttcggatcctggtctattttgagtgagggcctgttcctgctggagaaggacagcatgaaaaaggctctaagcgaatcccaagaagaaaagatcaataaggagattgcgaaaaaagactgctcctttaccgaactacaactggcgtacgagcgctactgcaccgagcacaacttgccggttgaaaaattctgcaaagactacttcgacatcgtcgattacaggggaaacggtgcgaaaagcgaaaaaacaaaagtgagcatcctgagcgaaatcctggaaacctttttacaattggactttgaccacattcaggacctgcaacaagaaaagaacgctgcgattcctatcaaagcatatcttgacgaagttcagaatttgtaccaccacctgaagttggtcgattatcgtggcgaagagcagaaagactcaaccttttatagcaaacacgatgaaatcctgaccgatctttctcagatcgtcccattgtataataaagtccgtaactttgttaccaaaaaactgggtgagagcaaaaagatcaagctgaacttcgattgcccgactctggctaatggctgggatgagaatcaagagtccagcaacgatgcaattatcctgagaaaggacggcaaatactatctgggcatttacaacccgaacaacaaaccgaaattcgcgaagaaggacagcatcgtgggtgattgctatgaaaaaatggcatacaagcaaatcgcactgccgatgggtttgggtgcatttgtgcgcaaatgctttggcaccgctcagaaatacggttggggttgcccggagaattgcctgaacagcgagggtaaaattatcatcaaagacgaggaggcgaagggtaatctggaggcaatcatcgactgttacaaagattttctgaacaagtacgaaaaggacggcttcaagtacaaggactacaatttttccttcctggactctgccagctatgaaaaactgtctgatttcttcaacgacgttaaaccgcagggctataagctgagctttacgtccatcccactgtcagagatcgataagatgattgatgaaggtaaactgtttttgtttcagatatataacaaagacttcgcgaagaaggcgacggggaagaagaacctgcataccctttattgggaaaacctattctcagtcgagaatctgcaagatgtggtgttgaagctcaatggcgaagccgagctgttctggcgtgaggctagcatcaaaaaggacaaggtgatcgttcacaaaaaaggttctattctggtgaatcgtaccaccacggatggtaagagcatcccggaggccatttatcaagaaatctatcaattaaaaaacaaaatggcggattccatcagcgacgaagcgaaacgccttctagagtccggcaccgttgtctgtaaagtcgccactcatgatatcgttaaggataaacattttactgaaaacacgtatctgttccattgtccgattaccatgaacttcaaggcaaaagaccgtaccaataaggaatttaacaatcatgttctggaggttcttaacaagaatccggatattaaggtgatcggcttagaccgtggcgaacgtcatctgctgtacctgagcctgatcaatcagaagggtgaaattgagtgccagaaaacgctgaacctagttgagcaagttcgtaatgataagaccgtttccgttaattatcatgaaaaactggtgcacaaagaaggcagccgtgatgctgcgagaaaaaactggcagaccattggcaatattaaagagctgaaggagggctacctgtcggcggtggtgcacgagattgcgagtctgatggtaaagcacaatgcgatcgttgtaatggaagacctgaatttcggctttaagcgcggtcgttttgctgtggagcgtcagatctaccaaaagttcgaaaacatgctgattgagaagctgaactatctggtttttaaagaccgtaaagtgacggagccgggtggcgttctgaacgcgtaccagttggcgaacaagagcgcgaaggtgacagatgtttataaacaatgcggttggctgttctatatcccggcagcgtacaccagcaaaattgatccgcgtaccggtttcgcgaatctgttcattaccaagggtctgaccaatgttgagaagaagaaggagtttttcggcaagttcgactcgattcgttatgatgcgaccgagtcttgtttcgttttttccttcgactacgcaaagatttgtgacaatgctgattacaagaagaaatgggatgtttacacccgtggtactcgtctcgtttacaacaagaccgaacgcaagaacgtgagcgtcaacccaaccgaagagttgcagtgtgtttttgatgagttcggcatcaagtggaataccggcgaagacctgattgaatctattagcctgatcccggcggaaaagtccaacgcgaagttcttcgacgttttgttgcgtatgtttaacgcgactcttcagatgagaaacagcgtgccgaataccgacaccgactacttggtcagcccggtgaaagctgaagacggcagctttttcgacagccgcgaggagtttaagaaaggtggcgatgcccgcctgccgatagactgcgatgctaatggtgcgtaccatattgccctgaaaggcttgtacttgttgttgaatgatttcaaccgtgataacaagggcgtcatccaaaacatctctaacaaggactggtttaaattcgtgcaggagaaagtttacaaagactaa

SEQ ID NO: 138 - DNA, 3882 bp, synthetic construct
  source 1..3882: mol_type = other DNA
atggctaggataattgatgaattttgtggacagatgaatggatacagccgttccatcacgctgcgtaaccgcctggtgccgatcggcaagaccgaggaaaatctgaaacagtttctggagaaggacttagagcgcgcaactgcgtacccggacatcaaaaacctgattgacgctatccatcgtaatgtcattgaggacaccttaagcaaagtggccctgaactggaacgaaatctttaatatcctcgcgacgtaccagaacgaaaaagataaaaagaaaaaggcggcgatcaaaaaggacctggagaagctccaaagcggtgcacgtaaaaagattgttgaggcattcaaaaagaacccggattttgaaaaactgttcaaagagggtctgtttaaagagttgctgcctgaactgatcaaaagcgcaccggttgatgaaatcgcggttaaaaccaaggcgctggaatgcttcaaccgttttagcacctatttcacgggtttccacgacaatcgcaaaaacatgtactcggaagaagctaaatctaccgcaattagctatcgcatcgtgaacgaaaatttcccgaaattttttgccaatatcaagttgttcaactatctgaaagagcactttccgcgaatcatcattgataccgaagagtccctgaaagactatttgaagggcaaaaagctggattctgtatttagcattgacggctttaacagcgtgctggcgcagagcgggattgatttctataacaccgtgataggcggtatttcaggtgaggccggcaccaaaaaaacgcagggtcttaacgagaagattaacttagcgcgccagcaattatccaaggaggagaagaacaagctgcgcggtaaaatggtggtgctgtttaaacagatcttgtctgatcgtgaaaccagcagctttatcccagagggttttgccaacaaggaggaggtgtactctacggtgaaagaattcaacaactcgattgccgaaaaggcggtgtccaaggtgcgtgatctattcctgcaccgcgaagaattcacgctaaacgagattttcgtcccggcaaagagcttgaccgacttcagtcaggccatcttcggatcctggtctattttgagtgagggcctgttcctgctggagaaggacagcatgaaaaaggctctaagcgaatcccaagaagaaaagatcaataaggagattgcgaaaaaagactgctcctttaccgaactacaactggcgtacgagcgctactgcaccgagcacaacttgccggttgaaaaattctgcaaagactacttcgacatcgtcgattacaggggaaacggtgcgaaaagcgaaaaaacaaaagtgagcatcctgagcgaaatcctggaaacctttttacaattggactttgaccacattcaggacctgcaacaagaaaagaacgctgcgattcctatcaaagcatatcttgacgaagttcagaatttgtaccaccacctgaagttggtcgattatcgtggcgaagagcagaaagactcaaccttttatagcaaacacgatgaaatcctgaccgatctttctcagatcgtcccattgtataataaagtccgtaactttgttaccaaaaaactgggtgagagcaaaaagatcaagctgaacttcgattgcccgactctggctaatggctgggatgagaatcaagagtccagcaacgatgcaattatcctgagaaaggacggcaaatactatctgggcatttacaacccgaacaacaaaccgaaattcgcgaagaaggacagcatcgtgggtgattgctatgaaaaaatggcatacaagcaaatcgcactgccgatgggtttgggtgcatttgtgcgcaaatgctttggcaccgctcagaaatacggttggggttgcccggagaattgcctgaacagcgagggtaaaattatcatcaaagacgaggaggcgaagggtaatctggaggcaatcatcgactgttacaaagattttctgaacaagtacgaaaaggacggcttcaagtacaaggactacaatttttccttcctggactctgccagctatgaaaaactgtctgatttcttcaacgacgttaaaccgcagggctataagctgagctttacgtccatcccactgtcagagatcgataagatgattgatgaaggtaaactgtttttgtttcagatatataacaaagacttcgcgaagaaggcgacggggaagaagaacctgcataccctttattgggaaaacctattctcagtcgagaatctgcaagatgtggtgttgaagctcaatggcgaagccgagctgttctggcgtgaggctagcatcaaaaaggacaaggtgatcgttcacaaaaaaggttctattctggtgaatcgtaccaccacggatggtaagagcatcccggaggccatttatcaagaaatctatcaattaaaaaacaaaatggcggattccatcagcgacgaagcgaaacgccttctagagtccggcaccgttgtctgtaaagtcgccactcatgatatcgttaaggataaacattttactgaaaacacgtatctgttccattgtccgattaccatgaacttcaaggcaaaagaccgtaccaataaggaatttaacaatcatgttctggaggttcttaacaagaatccggatattaaggtgatcggcttagaccgtggcgaacgtcatctgctgtacctgagcctgatcaatcagaagggtgaaattgagtgccagaaaacgctgaacctagttgagcaagttcgtaatgataagaccgtttccgttaattatcatgaaaaactggtgcacaaagaaggcagccgtgatgctgcgagaaaaaactggcagaccattggcaatattaaagagctgaaggagggctacctgtcggcggtggtgcacgagattgcgagtctgatggtaaagcacaatgcgatcgttgtaatggaagacctgaatttcggctttaagcgcggtcgttttgctgtggagcgtcagatctaccaaaagttcgaaaacatgctgattgagaagctgaactatctggtttttaaagaccgtaaagtgacggagccgggtggcgttctgaacgcgtaccagttggcgaacaagagcgcgaaggtgacagatgtttataaacaatgcggttggctgttctatatcccggcagcgtacaccagcaaaattgatccgcgtaccggtttcgcgaatctgttcattaccaagggtctgaccaatgttgagaagaagaaggagtttttcggcaagttcgactcgattcgttatgatgcgaccgagtcttgtttcgttttttccttcgactacgcaaagatttgtgacaatgctgattacaagaagaaatgggatgtttacacccgtggtactcgtctcgtttacaacaagaccgaacgcaagaacgtgagcgtcaacccaaccgaagagttgcagtgtgtttttgatgagttcggcatcaagtggaataccggcgaagacctgattgaatctattagcctgatcccggcggaaaagtccaacgcgaagttcttcgacgttttgttgcgtatgtttaacgcgactcttcagatgagaaacagcgtgccgaataccgacaccgactacttggtcagcccggtgaaagctgaagacggcagctttttcgacagccgcgaggagtttaagaaaggtggcgatgcccgcctgccgatagactgcgatgctaatggtgcgtaccatattgccctgaaaggcttgtacttgttgttgaatgatttcaaccgtgataacaagggcgtcatccaaaacatctctaacaaggactggtttaaattcgtgcaggagaaagtttacaaagactaa

SEQ ID NO: 139 - DNA, 3882 bp, synthetic construct
  source 1..3882: mol_type = other DNA
atggctaggataattgatgaattttgtggacagatgaatggatacagccgttccatcacgctgcgtaaccgcctggtgccgatcggcaagaccgaggaaaatctgaaacagtttctggagaaggacttagagcgcgcaactgcgtacccggacatcaaaaacctgattgacgctatccatcgtaatgtcattgaggacaccttaagcaaagtggccctgaactggaacgaaatctttaatatcctcgcgacgtaccagaacgaaaaagataaaaagaaaaaggcggcgatcaaaaaggacctggagaagctccaaagcggtgcacgtaaaaagattgttgaggcattcaaaaagaacccggattttgaaaaactgttcaaagagggtctgtttaaagagttgctgcctgaactgatcaaaagcgcaccggttgatgaaatcgcggttaaaaccaaggcgctggaatgcttcaaccgttttagcacctatttcacgggtttccacgacaatcgcaaaaacatgtactcggaagaagctaaatctaccgcaattagctatcgcatcgtgaacgaaaatttcccgaaatttgttgccaatatcaagttgttcaactatctgaaagagcactttccgcgaatcatcattgataccgaagagtccctgaaagactatttgaagggcaaaaagctggattctgtatttagcattgacggctttaacagcgtgctggcgcagagcgggattgatttctataacaccgtgataggcggtatttcaggtgaggccggcaccaaaaaaacgcagggtcttaacgagaagattaacttagcgcgccagcaattatccaaggaggagaagaacaagctgcgcggtaaaatggtggtgctgtttaaacagatcttgtctgatcgtgaaaccagcagctttatcccagtgggttttgccaacaaggaggaggtgtactctacggtgaaagaattcaacaactcgattgccgaaaaggcggtgtccaaggtgcgtgatctattcctgcaccgcgaagaattcacgctaaacgagattttcgtcccggcaaagagcttgaccgacttcagtcaggccatcttcggatcctggtctattttgagtgagggcctgttcctgctggagaaggacagcatgaaaaaggctctaagcgaatcccaagaagaaaagatcaataaggagattgcgaaaaaagactgctcctttaccgaactacaactggcgtacgagcgctactgcaccgagcacaacttgccggttgaaaaattctgcaaagactacttcgacatcgtcgattacaggggaaacggtgcgaaaagcgaaaaaacaaaagtgagcatcctgagcgaaatcctggaaacctttttacaattggactttgaccacattcaggacctgcaacaagaaaagaacgctgcgattcctatcaaagcatatcttgacgaagttcagaatttgtaccaccacctgaagttggtcgattatcgtggcgaagagcagaaagactcaaccttttatagcaaacacgatgaaatcctgaccgatctttctcagatcgtcccattgtataataaagtccgtaactttgttaccaaaaaactgggtgagagcaaaaagatcaagctgaacttcgattgcccgactctggctaatggctgggatgagaatcaagagtccagcaacgatgcaattatcctgagaaaggacggcaaatactatctgggcatttacaacccgaacaacaaaccgaaattcgcgaagaaggacagcatcgtgggtgattgctatgaaaaaatggcatacaagcaaatcgcactgccgatgggtttgggtgcatttgtgcgcaaatgctttggcaccgctcagaaatacggttggggttgcccggagaattgcctgaacagcgagggtaaaattatcatcaaagacgaggaggcgaagggtaatctggaggcaatcatcgactgttacaaagattttctgaacaagtacgaaaaggacggcttcaagtacaaggactacaatttttccttcctggactctgccagctatgaaaaactgtctgatttcttcaacgacgttaaaccgcagggctataagctgagctttacgtccatcccactgtcagagatcgataagatgattgatgaaggtaaactgtttttgtttcagatatataacaaagacttcgcgaagaaggcgacggggaagaagaacctgcataccctttattgggaaaacctattctcagtcgagaatctgcaagatgtggtgttgaagctcaatggcgaagccgagctgttctggcgtgaggctagcatcaaaaaggacaaggtgatcgttcacaaaaaaggttctattctggtgaatcgtaccaccacggatggtaagagcatcccggaggccatttatcaagaaatctatcaattaaaaaacaaaatggcggattccatcagcgacgaagcgaaacgccttctagagtccggcaccgttgtctgtaaagtcgccactcatgatatcgttaaggataaacattttactgaaaacacgtatctgttccattgtccgattaccatgaacttcaaggcaaaagaccgtaccaataaggaatttaacaatcatgttctggaggttcttaacaagaatccggatattaaggtgatcggcttagaccgtggcgaacgtcatctgctgtacctgagcctgatcaatcagaagggtgaaattgagtgccagaaaacgctgaacctagttgagcaagttcgtaatgataagaccgtttccgttaattatcatgaaaaactggtgcacaaagaaggcagccgtgatgctgcgagaaaaaactggcagaccattggcaatattaaagagctgaaggagggctacctgtcggcggtggtgcacgagattgcgagtctgatggtaaagcacaatgcgatcgttgtaatggaagacctgaatttcggctttaagcgcggtcgttttgctgtggagcgtcagatctaccaaaagttcgaaaacatgctgattgagaagctgaactatctggtttttaaagaccgtaaagtgacggagccgggtggcgttctgaacgcgtaccagttggcgaacaagagcgcgaaggtgacagatgtttataaacaatgcggttggctgttctatatcccggcagcgtacaccagcaaaattgatccgcgtaccggtttcgcgaatctgttcattaccaagggtctgaccaatgttgagaagaagaaggagtttttcggcaagttcgactcgattcgttatgatgcgaccgagtcttgtttcgttttttccttcgactacgcaaagatttgtgacaatgctgattacaagaagaaatgggatgtttacacccgtggtactcgtctcgtttacaacaagaccgaacgcaagaacgtgagcgtcaacccaaccgaagagttgcagtgtgtttttgatgagttcggcatcaagtggaataccggcgaagacctgattgaatctattagcctgatcccggcggaaaagtccaacgcgaagttcttcgacgttttgttgcgtatgtttaacgcgactcttcagatgagaaacagcgtgccgaataccgacaccgactacttggtcagcccggtgaaagctgaagacggcagctttttcgacagccgcgaggagtttaagaaaggtggcgatgcccgcctgccgatagactgcgatgctaatggtgcgtaccatattgccctgaaaggcttgtacttgttgttgaatgatttcaaccgtgataacaagggcgtcatccaaaacatctctaacaaggactggtttaaattcgtgcaggagaaagtttacaaagactaa

SEQ ID NO: 140 - DNA, 3882 bp, synthetic construct
  source 1..3882: mol_type = other DNA
atggctaggataattgatgaattttgtggacagatgaatggatacagccgttccatcacgctgcgtaaccgcctggtgccgatcggcaagaccgaggaaaatctgaaacagtttctggagaaggacttagagcgcgcaactgcgtacccggacatcaaaaacctgattgacgctatccatcgtaatgtcattgaggacaccttaagcaaagtggccctgaactggaacgaaatctttaatatcctcgcgacgtaccagaacgaaaaagataaaaagaaaaaggcggcgatcaaaaaggacctggagaagctccaaagcggtgcacgtaaaaagattgttgaggcattcaaaaagaacccggattttgaaaaactgttcaaagagggtctgtttaaagagttgctgcctgaactgatcaaaagcgcaccggttgatgaaatcgcggttaaaaccaaggcgctggaatgcttcaaccgttttagcacctatttcacgggtttccacgacaatcgcaaaaacatgtactcggaagaagctaaatctaccgcaattagctatcgcatcgtgaacgaaaatttcccgaaattttttgccaatatcaagttgttcaactatctgaatgagcactttccgcgaatcatcattgataccgaagagtccctgaaagactatttgaagggcaaaaagctggattctgtatttagcattgacggctttaacagcgtgctggcgcagagcgggattgatttctataacaccgtgataggcggtatttcaggtgaggccggcaccaaaaaaacgcagggtcttaacgagaagattaacttagcgcgccagcaattatccaaggaggagaagaacaagctgcgcggtaaaatggtggtgctgtttaaacagatcttgtctgatcgtgaaaccagcagctttatcccagtgggttttgccaacaaggaggaggtgtactctacggtgaaagaattcaacaactcgattgccgaaaaggcggtgtccaaggtgcgtgatctattcctgcaccgcgaagaattcacgctaaacgagattttcgtcccggcaaagagcttgaccgacttcagtcaggccatcttcggatcctggtctattttgagtgagggcctgttcctgctggagaaggacagcatgaaaaaggctctaagcgaatcccaagaagaaaagatcaataaggagattgcgaaaaaagactgctcctttaccgaactacaactggcgtacgagcgctactgcaccgagcacaacttgccggttgaaaaattctgcaaagactacttcgacatcgtcgattacaggggaaacggtgcgaaaagcgaaaaaacaaaagtgagcatcctgagcgaaatcctggaaacctttttacaattggactttgaccacattcaggacctgcaacaagaaaagaacgctgcgattcctatcaaagcatatcttgacgaagttcagaatttgtaccaccacctgaagttggtcgattatcgtggcgaagagcagaaagactcaaccttttatagcaaacacgatgaaatcctgaccgatctttctcagatcgtcccattgtataataaagtccgtaactttgttaccaaaaaactgggtgagagcaaaaagatcaagctgaacttcgattgcccgactctggctaatggctgggatgagaatcaagagtccagcaacgatgcaattatcctgagaaaggacggcaaatactatctgggcatttacaacccgaacaacaaaccgaaattcgcgaagaaggacagcatcgtgggtgattgctatgaaaaaatggcatacaagcaaatcgcactgccgatgggtttgggtgcatttgtgcgcaaatgctttggcaccgctcagaaatacggttggggttgcccggagaattgcctgaacagcgagggtaaaattatcatcaaagacgaggaggcgaagggtaatctggaggcaatcatcgactgttacaaagattttctgaacaagtacgaaaaggacggcttcaagtacaaggactacaatttttccttcctggactctgccagctatgaaaaactgtctgatttcttcaacgacgttaaaccgcagggctataagctgagctttacgtccatcccactgtcagagatcgataagatgattgatgaaggtaaactgtttttgtttcagatatataacaaagacttcgcgaagaaggcgacggggaagaagaacctgcataccctttattgggaaaacctattctcagtcgagaatctgcaagatgtggtgttgaagctcaatggcgaagccgagctgttctggcgtgaggctagcatcaaaaaggacaaggtgatcgttcacaaaaaaggttctattctggtgaatcgtaccaccacggatggtaagagcatcccggaggccatttatcaagaaatctatcaattaaaaaacaaaatggcggattccatcagcgacgaagcgaaacgccttctagagtccggcaccgttgtctgtaaagtcgccactcatgatatcgttaaggataaacattttactgaaaacacgtatctgttccattgtccgattaccatgaacttcaaggcaaaagaccgtaccaataaggaatttaacaatcatgttctggaggttcttaacaagaatccggatattaaggtgatcggcttagaccgtggcgaacgtcatctgctgtacctgagcctgatcaatcagaagggtgaaattgagtgccagaaaacgctgaacctagttgagcaagttcgtaatgataagaccgtttccgttaattatcatgaaaaactggtgcacaaagaaggcagccgtgatgctgcgagaaaaaactggcagaccattggcaatattaaagagctgaaggagggctacctgtcggcggtggtgcacgagattgcgagtctgatggtaaagcacaatgcgatcgttgtaatggaagacctgaatttcggctttaagcgcggtcgttttgctgtggagcgtcagatctaccaaaagttcgaaaacatgctgattgagaagctgaactatctggtttttaaagaccgtaaagtgacggagccgggtggcgttctgaacgcgtaccagttggcgaacaagagcgcgaaggtgacagatgtttataaacaatgcggttggctgttctatatcccggcagcgtacaccagcaaaattgatccgcgtaccggtttcgcgaatctgttcattaccaagggtctgaccaatgttgagaagaagaaggagtttttcggcaagttcgactcgattcgttatgatgcgaccgagtcttgtttcgttttttccttcgactacgcaaagatttgtgacaatgctgattacaagaagaaatgggatgtttacacccgtggtactcgtctcgtttacaacaagaccgaacgcaagaacgtgagcgtcaacccaaccgaagagttgcagtgtgtttttgatgagttcggcatcaagtggaataccggcgaagacctgattgaatctattagcctgatcccggcggaaaagtccaacgcgaagttcttcgacgttttgttgcgtatgtttaacgcgactcttcagatgagaaacagcgtgccgaataccgacaccgactacttggtcagcccggtgaaagctgaagacggcagctttttcgacagccgcgaggagtttaagaaaggtggcgatgcccgcctgccgatagactgcgatgctaatggtgcgtaccatattgccctgaaaggcttgtacttgttgttgaatgatttcaaccgtgataacaagggcgtcatccaaaacatctctaacaaggactggtttaaattcgtgcaggagaaagtttacaaagactaa

SEQ ID NO: 141 - DNA, 3882 bp, synthetic construct
  source 1..3882: mol_type = other DNA
atggctaggataattgatgaattttgtggacagatgaatggatacagccgttccatcacgctgcgtaaccgcctggtgccgatcggcaagaccgaggaaaatctgaaacagtttctggagaaggacttagagcgcgcaactgcgtacccggacatcaaaaacctgattgacgctatccatcgtaatgtcattgaggacaccttaagcaaagtggccctgaactggaacgaaatctttaatatcctcgcgacgtaccagaacgaaaaagataaaaagaaaaaggcggcgatcaaaaaggacctggagaagctccaaagcggtgcacgtaaaaagattgttgaggcattcaaaaagaacccggattttgaaaaactgttcaaagagggtctgtttaaagagttgctgcctgaactgatcaaaagcgcaccggttgatgaaatcgcggttaaaaccaaggcgctggaatgcttcaaccgttttagcacctatttcacgggtttccacgacaatcgcaaaaacatgtactcggaagaagctaaatctaccgcaattagctatcgcatcgtgaacgaaaatttcccgaaattttttgccaatatcaagttgttcaactatctgaaagagcactttccgcgaatcatcattgataccgaagagtccctgaaagactatttgaagggcaaaaagctggattctgtatttagcattgacggctttaacagcgtgctggcgcagagcgggattgatttctataacaccgtgataggcggtatttcaggtgaggccggcaccaaaaaaacgcagggtcttaacgagaagattaacttagcgcgccagcaattatccaaggaggagaagaacaagctgcgcggtaaaatgatggtgctgtttaaacagatcttgtctgatcgtgaaaccagcagctttatcccagtgggttttgccaacaaggaggaggtgtactctacggtgaaagaattcaacaactcgattgccgaaaaggcggtgtccaaggtgcgtgatctattcctgcaccgcgaagaattcacgctaaacgagattttcgtcccggcaaagagcttgaccgacttcagtcaggccatcttcggatcctggtctattttgagtgagggcctgttcctgctggagaaggacagcatgaaaaaggctctaagcgaatcccaagaagaaaagatcaataaggagattgcgaaaaaagactgctcctttaccgaactacaactggcgtacgagcgctactgcaccgagcacaacttgccggttgaaaaattctgcaaagactacttcgacatcgtcgattacaggggaaacggtgcgaaaagcgaaaaaacaaaagtgagcatcctgagcgaaatcctggaaacctttttacaattggactttgaccacattcaggacctgcaacaagaaaagaacgctgcgattcctatcaaagcatatcttgacgaagttcagaatttgtaccaccacctgaagttggtcgattatcgtggcgaagagcagaaagactcaaccttttatagcaaacacgatgaaatcctgaccgatctttctcagatcgtcccattgtataataaagtccgtaactttgttaccaaaaaactgggtgagagcaaaaagatcaagctgaacttcgattgcccgactctggctaatggctgggatgagaatcaagagtccagcaacgatgcaattatcctgagaaaggacggcaaatactatctgggcatttacaacccgaacaacaaaccgaaattcgcgaagaaggacagcatcgtgggtgattgctatgaaaaaatggcatacaagcaaatcgcactgccgatgggtttgggtgcatttgtgcgcaaatgctttggcaccgctcagaaatacggttggggttgcccggagaattgcctgaacagcgagggtaaaattatcatcaaagacgaggaggcgaagggtaatctggaggcaatcatcgactgttacaaagattttctgaacaagtacgaaaaggacggcttcaagtacaaggactacaatttttccttcctggactctgccagctatgaaaaactgtctgatttcttcaacgacgttaaaccgcagggctataagctgagctttacgtccatcccactgtcagagatcgataagatgattgatgaaggtaaactgtttttgtttcagatatataacaaagacttcgcgaagaaggcgacggggaagaagaacctgcataccctttattgggaaaacctattctcagtcgagaatctgcaagatgtggtgttgaagctcaatggcgaagccgagctgttctggcgtgaggctagcatcaaaaaggacaaggtgatcgttcacaaaaaaggttctattctggtgaatcgtaccaccacggatggtaagagcatcccggaggccatttatcaagaaatctatcaattaaaaaacaaaatggcggattccatcagcgacgaagcgaaacgccttctagagtccggcaccgttgtctgtaaagtcgccactcatgatatcgttaaggataaacattttactgaaaacacgtatctgttccattgtccgattaccatgaacttcaaggcaaaagaccgtaccaataaggaatttaacaatcatgttctggaggttcttaacaagaatccggatattaaggtgatcggcttagaccgtggcgaacgtcatctgctgtacctgagcctgatcaatcagaagggtgaaattgagtgccagaaaacgctgaacctagttgagcaagttcgtaatgataagaccgtttccgttaattatcatgaaaaactggtgcacaaagaaggcagccgtgatgctgcgagaaaaaactggcagaccattggcaatattaaagagctgaaggagggctacctgtcggcggtggtgcacgagattgcgagtctgatggtaaagcacaatgcgatcgttgtaatggaagacctgaatttcggctttaagcgcggtcgttttgctgtggagcgtcagatctaccaaaagttcgaaaacatgctgattgagaagctgaactatctggtttttaaagaccgtaaagtgacggagccgggtggcgttctgaacgcgtaccagttggcgaacaagagcgcgaaggtgacagatgtttataaacaatgcggttggctgttctatatcccggcagcgtacaccagcaaaattgatccgcgtaccggtttcgcgaatctgttcattaccaagggtctgaccaatgttgagaagaagaaggagtttttcggcaagttcgactcgattcgttatgatgcgaccgagtcttgtttcgttttttccttcgactacgcaaagatttgtgacaatgctgattacaagaagaaatgggatgtttacacccgtggtactcgtctcgtttacaacaagaccgaacgcaagaacgtgagcgtcaacccaaccgaagagttgcagtgtgtttttgatgagttcggcatcaagtggaataccggcgaagacctgattgaatctattagcctgatcccggcggaaaagtccaacgcgaagttcttcgacgttttgttgcgtatgtttaacgcgactcttcagatgagaaacagcgtgccgaataccgacaccgactacttggtcagcccggtgaaagctgaagacggcagctttttcgacagccgcgaggagtttaagaaaggtggcgatgcccgcctgccgatagactgcgatgctaatggtgcgtaccatattgccctgaaaggcttgtacttgttgttgaatgatttcaaccgtgataacaagggcgtcatccaaaacatctctaacaaggactggtttaaattcgtgcaggagaaagtttacaaagactaa

SEQ ID NO: 142 - DNA, 3882 bp, synthetic construct
  source 1..3882: mol_type = other DNA
atggctaggataattgatgaattttgtggacagatgaatggatacagccgttccatcacgctgcgtaaccgcctggtgccgatcggcaagaccgaggaaaatctgaaacagtttctggagaaggacttagagcgcgcaactgcgtacccggacatcaaaaacctgattgacgctatccatcgtaatgtcattgaggacaccttaagcaaagtggccctgaactggaacgaaatctttaatatcctcgcgacgtaccagaacgaaaaagataaaaagaaaaaggcggcgatcaaaaaggacctggagaagctccaaagcggtgcacgtaaaaagattgttgaggcattcaaaaagaacccggattttgaaaaactgttcaaagagggtctgtttaaagagttgctgcctgaactgatcaaaagcgcaccggttgatgaaatcgcggttaaaaccaaggcgctggaatgcttcaaccgttttagcacctatttcacgggtttccacgacaatcgcaaaaacatgtactcggaagaagctaaatctaccgcaattagctatcgcatcgtgaacgaaaatttcccgaaattttttgccaatatcaagttgttcaactatctgaaagagcactttccgcaaatcatcattgataccgaagagtccctgaaagactatttgaagggcaaaaagctggattctgtatttagcattgacggctttaacagcgtgctggcgcagagcgggattgatttctataacaccgtgataggcggtatttcaggtgaggccggcaccaaaaaaacgcagggtcttaacgagaagattaacttagcgcgccagcaattatccaaggaggagaagaacaagctgcgcggtaaaatggtggtgctgtttaaacagatcttgtctgatcgtgaaaccagcagctttatcccagtgggttttgccaacaaggaggaggtgtactctacggtgaaagaattcaacaactcgattgccgaaaaggcggtgtccaaggtgcgtgatctattcctgcaccgcgaagaattcacgctaaacgagattttcgtcccggcaaagagcttgaccgacttcagtcaggccatcttcggatcctggtctattttgagtgagggcctgttcctgctggagaaggacagcatgaaaaaggctctaagcgaatcccaagaagaaaagatcaataaggagattgcgaaaaaagactgctcctttaccgaactacaactggcgtacgagcgctactgcaccgagcacaacttgccggttgaaaaattctgcaaagactacttcgacatcgtcgattacaggggaaacggtgcgaaaagcgaaaaaacaaaagtgagcatcctgagcgaaatcctggaaacctttttacaattggactttgaccacattcaggacctgcaacaagaaaagaacgctgcgattcctatcaaagcatatcttgacgaagttcagaatttgtaccaccacctgaagttggtcgattatcgtggcgaagagcagaaagactcaaccttttatagcaaacacgatgaaatcctgaccgatctttctcagatcgtcccattgtataataaagtccgtaactttgttaccaaaaaactgggtgagagcaaaaagatcaagctgaacttcgattgcccgactctggctaatggctgggatgagaatcaagagtccagcaacgatgcaattatcctgagaaaggacggcaaatactatctgggcatttacaacccgaacaacaaaccgaaattcgcgaagaaggacagcatcgtgggtgattgctatgaaaaaatggcatacaagcaaatcgcactgccgatgggtttgggtgcatttgtgcgcaaatgctttggcaccgctcagaaatacggttggggttgcccggagaattgcctgaacagcgagggtaaaattatcatcaaagacgaggaggcgaagggtaatctggaggcaatcatcgactgttacaaagattttctgaacaagtacgaaaaggacggcttcaagtacaaggactacaatttttccttcctggactctgccagctatgaaaaactgtctgatttcttcaacgacgttaaaccgcagggctataagctgagctttacgtccatcccactgtcagagatcgataagatgattgatgaaggtaaactgtttttgtttcagatatataacaaagacttcgcgaagaaggcgacggggaagaagaacctgcataccctttattgggaaaacctattctcagtcgagaatctgcaagatgtggtgttgaagctcaatggcgaagccgagctgttctggcgtgaggctagcatcaaaaaggacaaggtgatcgttcacaaaaaaggttctattctggtgaatcgtaccaccacggatggtaagagcatcccggaggccatttatcaagaaatctatcaattaaaaaacaaaatggcggattccatcagcgacgaagcgaaacgccttctagagtccggcaccgttgtctgtaaagtcgccactcatgatatcgttaaggataaacattttactgaaaacacgtatctgttccattgtccgattaccatgaacttcaaggcaaaagaccgtaccaataaggaatttaacaatcatgttctggaggttcttaacaagaatccggatattaaggtgatcggcttagaccgtggcgaacgtcatctgctgtacctgagcctgatcaatcagaagggtgaaattgagtgccagaaaacgctgaacctagttgagcaagttcgtaatgataagaccgtttccgttaattatcatgaaaaactggtgcacaaagaaggcagccgtgatgctgcgagaaaaaactggcagaccattggcaatattaaagagctgaaggagggctacctgtcggcggtggtgcacgagattgcgagtctgatggtaaagcacaatgcgatcgttgtaatggaagacctgaatttcggctttaagcgcggtcgttttgctgtggagcgtcagatctaccaaaagttcgaaaacatgctgattgagaagctgaactatctggtttttaaagaccgtaaagtgacggagccgggtggcgttctgaacgcgtaccagttggcgaacaagagcgcgaaggtgacagatgtttataaacaatgcggttggctgttctatatcccggcagcgtacaccagcaaaattgatccgcgtaccggtttcgcgaatctgttcattaccaagggtctgaccaatgttgagaagaagaaggagtttttcggcaagttcgactcgattcgttatgatgcgaccgagtcttgtttcgttttttccttcgactacgcaaagatttgtgacaatgctgattacaagaagaaatgggatgtttacacccgtggtactcgtctcgtttacaacaagaccgaacgcaagaacgtgagcgtcaacccaaccgaagagttgcagtgtgtttttgatgagttcggcatcaagtggaataccggcgaagacctgattgaatctattagcctgatcccggcggaaaagtccaacgcgaagttcttcgacgttttgttgcgtatgtttaacgcgactcttcagatgagaaacagcgtgccgaataccgacaccgactacttggtcagcccggtgaaagctgaagacggcagctttttcgacagccgcgaggagtttaagaaaggtggcgatgcccgcctgccgatagactgcgatgctaatggtgcgtaccatattgccctgaaaggcttgtacttgttgttgaatgatttcaaccgtgataacaagggcgtcatccaaaacatctctaacaaggactggtttaaattcgtgcaggagaaagtttacaaagactaa

SEQ ID NO: 143 - DNA, 3882 bp, synthetic construct
  source 1..3882: mol_type = other DNA
atggctaggataattgatgaattttgtggacagatgaatggatacagccgttccatcacgctgcgtaaccgcctggtgccgatcggcaagaccgaggaaaatctgaaacagtttctggagaaggacttagagcgcgcaactgcgtacccggacatcaaaaacctgattgacgctatccatcgtaatgtcattgaggacaccttaagcaaagtggccctgaactggaacgaaatctctaatatcctcgcgacgtaccagaacgaaaaagataaaaagaaaaaggcggcgatcaaaaaggacctggagaagctccaaagcggtgcacgtaaaaagattgttgaggcattcaaaaagaacccggattttgaaaaactgttcaaagagggtctgtttaaagagttgctgcctgaactgatcaaaagcgcaccggttgatgaaatcgcggttaaaaccaaggcgctggaatgcttcaaccgttttagcacctatttcacgggtttccacgacaatcgcaaaaacatgtactcggaagaagctaaatctaccgcaattagctatcgcatcgtgaacgaaaatttcccgaaattttttgccaatatcaagttgttcaactatctgaaagagcactttccgcgaatcatcattgataccgaagagtccctgaaagactatttgaagggcaaaaagctggattctgtatttagcattgacggctttaacagcgtgctggcgcagagcgggattgatttctataacaccgtgataggcggtatttcaggtgaggccggcaccaaaaaaacgcagggtcttaacgagaagattaacttagcgcgccagcaattatccaaggaggagaagaacaagctgcgcggtaaaatggtggtgctgtttaaacagatcttgtctgatcgtgaaaccagcagctttatcccagtgggttttgccaacaaggaggaggtgtactctacggtgaaagaattcaacaactcgattgccgaaaaggcggtgtccaaggtgcgtgatctattcctgcaccgcgaagaattcacgctaaacgagattttcgtcccggcaaagagcttgaccgacttcagtcaggccatcttcggatcctggtctattttgagtgagggcctgttcctgctggagaaggacagcatgaaaaaggctctaagcgaatcccaagaagaaaagatcaataaggagattgcgaaaaaagactgctcctttaccgaactacaactggcgtacgagcgctactgcaccgagcacaacttgccggttgaaaaattctgcaaagactacttcgacatcgtcgattacaggggaaacggtgcgaaaagcgaaaaaacaaaagtgagcatcctgagcgaaatcctggaaacctttttacaattggactttgaccacattcaggacctgcaacaagaaaagaacgctgcgattcctatcaaagcatatcttgacgaagttcagaatttgtaccaccacctgaagttggtcgattatcgtggcgaagagcagaaagactcaaccttttatagcaaacacgatgaaatcctgaccgatctttctcagatcgtcccattgtataataaagtccgtaactttgttaccaaaaaactgggtgagagcaaaaagatcaagctgaacttcgattgcccgactctggctaatggctgggatgagaatcaagagtccagcaacgatgcaattatcctgagaaaggacggcaaatactatctgggcatttacaacccgaacaacaaaccgaaattcgcgaagaaggacagcatcgtgggtgattgctatgaaaaaatggcatacaagcaaatcgcactgccgatgggtttgggtgcatttgtgcgcaaatgctttggcaccgctcagaaatacggttggggttgcccggagaattgcctgaacagcgagggtaaaattatcatcaaagacgaggaggcgaagggtaatctggaggcaatcatcgactgttacaaagattttctgaacaagtacgaaaaggacggcttcaagtacaaggactacaatttttccttcctggactctgccagctatgaaaaactgtctgatttcttcaacgacgttaaaccgcagggctataagctgagctttacgtccatcccactgtcagagatcgataagatgattgatgaaggtaaactgtttttgtttcagatatataacaaagacttcgcgaagaaggcgacggggaagaagaacctgcataccctttattgggaaaacctattctcagtcgagaatctgcaagatgtggtgttgaagctcaatggcgaagccgagctgttctggcgtgaggctagcatcaaaaaggacaaggtgatcgttcacaaaaaaggttctattctggtgaatcgtaccaccacggatggtaagagcatcccggaggccatttatcaagaaatctatcaattaaaaaacaaaatggcggattccatcagcgacgaagcgaaacgccttctagagtccggcaccgttgtctgtaaagtcgccactcatgatatcgttaaggataaacattttactgaaaacacgtatctgttccattgtccgattaccatgaacttcaaggcaaaagaccgtaccaataaggaatttaacaatcatgttctggaggttcttaacaagaatccggatattaaggtgatcggcttagaccgtggcgaacgtcatctgctgtacctgagcctgatcaatcagaagggtgaaattgagtgccagaaaacgctgaacctagttgagcaagttcgtaatgataagaccgtttccgttaattatcatgaaaaactggtgcacaaagaaggcagccgtgatgctgcgagaaaaaactggcagaccattggcaatattaaagagctgaaggagggctacctgtcggcggtggtgcacgagattgcgagtctgatggtaaagcacaatgcgatcgttgtaatggaagacctgaatttcggctttaagcgcggtcgttttgctgtggagcgtcagatctaccaaaagttcgaaaacatgctgattgagaagctgaactatctggtttttaaagaccgtaaagtgacggagccgggtggcgttctgaacgcgtaccagttggcgaacaagagcgcgaaggtgacagatgtttataaacaatgcggttggctgttctatatcccggcagcgtacaccagcaaaattgatccgcgtaccggtttcgcgaatctgttcattaccaagggtctgaccaatgttgagaagaagaaggagtttttcggcaagttcgactcgattcgttatgatgcgaccgagtcttgtttcgttttttccttcgactacgcaaagatttgtgacaatgctgattacaagaagaaatgggatgtttacacccgtggtactcgtctcgtttacaacaagaccgaacgcaagaacgtgagcgtcaacccaaccgaagagttgcagtgtgtttttgatgagttcggcatcaagtggaataccggcgaagacctgattgaatctattagcctgatcccggcggaaaagtccaacgcgaagttcttcgacgttttgttgcgtatgtttaacgcgactcttcagatgagaaacagcgtgccgaataccgacaccgactacttggtcagcccggtgaaagctgaagacggcagctttttcgacagccgcgaggagtttaagaaaggtggcgatgcccgcctgccgatagactgcgatgctaatggtgcgtaccatattgccctgaaaggcttgtacttgttgttgaatgatttcaaccgtgataacaagggcgtcatccaaaacatctctaacaaggactggtttaaattcgtgcaggagaaagtttacaaagactaa

SEQ ID NO: 144 - DNA, 3882 bp, synthetic construct
  source 1..3882: mol_type = other DNA
atggctaggataattgatgaattttgtggacagatgaatggatacagccgttccatcacgctgcgtaaccgcctggtgccgatcggcaagaccgaggaaaatctgaaacagtttctggagaaggacttagagcgcgcaactgcgtacccggacatcaaaaacctgattgacgctatccatcgtaatgtcattgaggacaccttaagcaaagtggccctgaactggaacgaaatctttaatatcctcgcgacgtaccagaacgaaaaagataaaaagaaaaaggcggcgatcaaaaaggacctggagaagctccaaagcggtgcacgtaaaaagattgttgaggcattcaaaaagaacccggattttgaaaaactgttcaaagagggtctgtttaaagagttgctgcctgaactgatcaaaagcgcaccggttgatgaaatcgcggttaaaaccaaggcgctggaatgcttcaaccgttttagcacctatttcacgggtttccacgacaatcgcaaaaacatgtactcggaagaagctaaatctaccgcaattagctatcgcatcgtgaacgaaaatttcccgaaattttttgccaatatcaagttgttcaactatctgaaagagcactttccgcgaatcatcattgataccgaagagtccctgaaagactatttgaagggcaaaaagctggattctgtatttagcattgacggctttaacagcgtgctggcgcagagcgggattgatttctataacaccgtgataggcggtatttcaggtgaggccggcaccaaaaaaacgcagggtcttaacgagaagattaacttagcgcgccagcaattatccaaggaggagaagaacaagctgcgcggtaaaatggtggtgctgtttaaagagatcttgtctgatcgtgaaaccagcagctttatcccagtgggttttgccaacaaggaggaggtgtactctacggtgaaagaattcaacaactcgattgccgaaaaggcggtgtccaaggtgcgtgatctattcctgcaccgcgaagaattcacgctaaacgagattttcgtcccggcaaagagcttgaccgacttcagtcaggccatcttcggatcctggtctattttgagtgagggcctgttcctgctggagaaggacagcatgaaaaaggctctaagcgaatcccaagaagaaaagatcaataaggagattgcgaaaaaagactgctcctttaccgaactacaactggcgtacgagcgctactgcaccgagcacaacttgccggttgaaaaattctgcaaagactacttcgacatcgtcgattacaggggaaacggtgcgaaaagcgaaaaaacaaaagtgagcatcctgagcgaaatcctggaaacctttttacaattggactttgaccacattcaggacctgcaacaagaaaagaacgctgcgattcctatcaaagcatatcttgacgaagttcagaatttgtaccaccacctgaagttggtcgattatcgtggcgaagagcagaaagactcaaccttttatagcaaacacgatgaaatcctgaccgatctttctcagatcgtcccattgtataataaagtccgtaactttgttaccaaaaaactgggtgagagcaaaaagatcaagctgaacttcgattgcccgactctggctaatggctgggatgagaatcaagagtccagcaacgatgcaattatcctgagaaaggacggcaaatactatctgggcatttacaacccgaacaacaaaccgaaattcgcgaagaaggacagcatcgtgggtgattgctatgaaaaaatggcatacaagcaaatcgcactgccgatgggtttgggtgcatttgtgcgcaaatgctttggcaccgctcagaaatacggttggggttgcccggagaattgcctgaacagcgagggtaaaattatcatcaaagacgaggaggcgaagggtaatctggaggcaatcatcgactgttacaaagattttctgaacaagtacgaaaaggacggcttcaagtacaaggactacaatttttccttcctggactctgccagctatgaaaaactgtctgatttcttcaacgacgttaaaccgcagggctataagctgagctttacgtccatcccactgtcagagatcgataagatgattgatgaaggtaaactgtttttgtttcagatatataacaaagacttcgcgaagaaggcgacggggaagaagaacctgcataccctttattgggaaaacctattctcagtcgagaatctgcaagatgtggtgttgaagctcaatggcgaagccgagctgttctggcgtgaggctagcatcaaaaaggacaaggtgatcgttcacaaaaaaggttctattctggtgaatcgtaccaccacggatggtaagagcatcccggaggccatttatcaagaaatctatcaattaaaaaacaaaatggcggattccatcagcgacgaagcgaaacgccttctagagtccggcaccgttgtctgtaaagtcgccactcatgatatcgttaaggataaacattttactgaaaacacgtatctgttccattgtccgattaccatgaacttcaaggcaaaagaccgtaccaataaggaatttaacaatcatgttctggaggttcttaacaagaatccggatattaaggtgatcggcttagaccgtggcgaacgtcatctgctgtacctgagcctgatcaatcagaagggtgaaattgagtgccagaaaacgctgaacctagttgagcaagttcgtaatgataagaccgtttccgttaattatcatgaaaaactggtgcacaaagaaggcagccgtgatgctgcgagaaaaaactggcagaccattggcaatattaaagagctgaaggagggctacctgtcggcggtggtgcacgagattgcgagtctgatggtaaagcacaatgcgatcgttgtaatggaagacctgaatttcggctttaagcgcggtcgttttgctgtggagcgtcagatctaccaaaagttcgaaaacatgctgattgagaagctgaactatctggtttttaaagaccgtaaagtgacggagccgggtggcgttctgaacgcgtaccagttggcgaacaagagcgcgaaggtgacagatgtttataaacaatgcggttggctgttctatatcccggcagcgtacaccagcaaaattgatccgcgtaccggtttcgcgaatctgttcattaccaagggtctgaccaatgttgagaagaagaaggagtttttcggcaagttcgactcgattcgttatgatgcgaccgagtcttgtttcgttttttccttcgactacgcaaagatttgtgacaatgctgattacaagaagaaatgggatgtttacacccgtggtactcgtctcgtttacaacaagaccgaacgcaagaacgtgagcgtcaacccaaccgaagagttgcagtgtgtttttgatgagttcggcatcaagtggaataccggcgaagacctgattgaatctattagcctgatcccggcggaaaagtccaacgcgaagttcttcgacgttttgttgcgtatgtttaacgcgactcttcagatgagaaacagcgtgccgaataccgacaccgactacttggtcagcccggtgaaagctgaagacggcagctttttcgacagccgcgaggagtttaagaaaggtggcgatgcccgcctgccgatagactgcgatgctaatggtgcgtaccatattgccctgaaaggcttgtacttgttgttgaatgatttcaaccgtgataacaagggcgtcatccaaaacatctctaacaaggactggtttaaattcgtgcaggagaaagtttacaaagactaa

SEQ ID NO: 145 - DNA, 3882 bp, synthetic construct
  source 1..3882: mol_type = other DNA
atggctaggataattgatgaattttgtggacagatgaatggatacagccgttccatcacgctgcgtaaccgcctggtgccgatcggcaagaccgaggaaaatctgaaacagtttctggagaaggacttagagcgcgcaactgcgtacccggacatcaaaaacctgattgacgctatccatcgtaatgtcattgaggacaccttaagcaaagtggccctgaactggaacgaaatctttaatatcctcgcgacgtaccagaacgaaaaagataaaaagaaaaaggcggcgatcaaaaaggacctggagaagctccaaagcggtgcacgtaaaaagattgttgaggcattcaaaaagaacccggattttgaaaaactgttcaaagagggtctgtttaaagagttgctgcctgaactgatcaaaagcgcaccggttgatgaaatcgcggttaaaaccaaggcgctggaatgcttcaaccgttttagcacctatttcacgggtttccacgacaatcgcaaaaacatgtactcggaagaagctaaatctaccgcaattagctatcgcatcgtgaacgaaaatttcccgaaattttttgccaatatcaagttgttcaactatctgaaagagcactttccgcgaatcatcattgataccgaagagtccctgaaagactatttgaagggcaaaaagctggattctgtatttagcattgacggctttaacagcgtgctggcgcagagcgggattgatttctataacaccgtgataggcggtatttcaggtgaggccggcaccaaaaaaacgcagggtcttaacgagaagattaacttagcgcgccagcaattatccaaggaggagaagaacaagctgcgcggtaaaatggtggtgctgtttaaacagatcttgtctgatcgtgaaaccagcagctttatcccagtgggttttgccaacaaggaggaggtgtactctacggtgaaagaattcaacaactcgattgccgaaaaggcggtgtccaaggtgcgtgatctattcctgcaccgcgaagaattcacgctaaacgagattttcgtcccggcaaagagcttgaccgacttcagtcaggccatcttcggatcctggtctattttgagtgagggcctgttcctgctggagaaggacagcatgaaaaaggctctaagcgaatcccaagaagaaaagatcaataaggagattgcgaaaaaagactgctcctttaccgaactacaactggcgtacgagcgctactgcaccgagcacaacttgccggttgaaaaattctgcaaagactacttcgacatcgtcgattacaggggaaacggtgcgaaaagcgaaaaaacaaaagtgagcatcctgagcgaaatcctggaaacctttttacaattggactttgaccacattcaggacctgcaacaagaaaagaacgctgcgattcctatcaaagcatatcttgacgaagttcagaatttgtaccaccacctgaagttggtcgattatcgtggcgaagagcagaaagactcaaccttttatagcaaacacgatgaaatcctgaccgatctttctcagatcgtcccattgtataataaagtccgtaactttgttaccaaaaaactgggtgagagcaaaaagatcaagctgaacttcgattgcccgactctggctaatggctgggatgagaatcaagagtccagcaacgatgcaattatcctgagaaaggacggcaaatactatctgggcatttacaacccgaacaacaaaccgaaattcgcgaagaaggacagcatcgtgggtgattgctatgaaaaaatggcatacaagcaaatcgcactgccgatgggtttgggtgcatttgtgcgcaaatgctttggcaccgctcagaaatacggttggggttgcccggagaattgcctgaacagcgagggtaaaattatcatcaaagacgaggaggcgaagggtaatctggaggcaatcatcgactgttacaaagattttctgaacaagtacgaaaaggacggcttcaagtacaaggactacaatttttccttcctggactctgccagctatgaaaaactgtctgatttcttcaacgacgttaaaccgcagggctataagctgagctttacgtccatcccactgtcagagatcgataagatgattgatgaaggtaaactgtttttgtttcagatatataacaaagacttcgcgaagaaggcgacggggaagaagaacctgcataccctttattgggaaaacctattctcagtcgagaatctgcaagatgtggtgttgaagctcaatggcgaagccgagctgttctggcgtgaggctagcatcaaaaaggacaaggtgatcgttcacaaaaaaggttctattctggtgaatcgtaccaccacggatggtaagagcatcccggaggccatttatcaagaaatctatcaattaaaaaacaaaatggcggattccatcagcgacgaagcgaaacgccttctagagtccggcaccgttgtctgtaaagtcgccactcatgatatcgttaaggataaacattttactgaaaacacgtatctgttccattgtccgattaccatgaacttcaaggcaaaagaccgtaccaataaggaatttaacaatcatgttctggaggttcttaacaagaatccggatattaaggtgatcggcttagaccgtggcgaacgtcatctgctgtacctgagcctgatcaatcagaagggtgaaattgagtgccagaaaacgctgaacctagttgagcaaattcgtaatgataagaccgtttccgttaattatcatgaaaaactggtgcacaaagaaggcagccgtgatgctgcgagaaaaaactggcagaccattggcaatattaaagagctgaaggagggctacctgtcggcggtggtgcacgagattgcgagtctgatggtaaagcacaatgcgatcgttgtaatggaagacctgaatttcggctttaagcgcggtcgttttgctgtggagcgtcagatctaccaaaagttcgaaaacatgctgattgagaagctgaactatctggtttttaaagaccgtaaagtgacggagccgggtggcgttctgaacgcgtaccagttggcgaacaagagcgcgaaggtgacagatgtttataaacaatgcggttggctgttctatatcccggcagcgtacaccagcaaaattgatccgcgtaccggtttcgcgaatctgttcattaccaagggtctgaccaatgttgagaagaagaaggagtttttcggcaagttcgactcgattcgttatgatgcgaccgagtcttgtttcgttttttccttcgactacgcaaagatttgtgacaatgctgattacaagaagaaatgggatgtttacacccgtggtactcgtctcgtttacaacaagaccgaacgcaagaacgtgagcgtcaacccaaccgaagagttgcagtgtgtttttgatgagttcggcatcaagtggaataccggcgaagacctgattgaatctattagcctgatcccggcggaaaagtccaacgcgaagttcttcgacgttttgttgcgtatgtttaacgcgactcttcagatgagaaacagcgtgccgaataccgacaccgactacttggtcagcccggtgaaagctgaagacggcagctttttcgacagccgcgaggagtttaagaaaggtggcgatgcccgcctgccgatagactgcgatgctaatggtgcgtaccatattgccctgaaaggcttgtacttgttgttgaatgatttcaaccgtgataacaagggcgtcatccaaaacatctctaacaaggactggtttaaattcgtgcaggagaaagtttacaaagactaa

SEQ ID NO: 146 - DNA, 3882 bp, synthetic construct
  source 1..3882: mol_type = other DNA
atggctaggataattgatgaattttgtggacagatgaatggatacagccgttccatcacgctgcgtaaccgcctggtgccgatcggcaagaccgaggaaaatctgaaacagtttctggagaaggacttagagcgcgcaactgcgtacccggacatcaaaaacctgattgacgctatccatcgtaatgtcattgaggacaccttaagcaaagtggccctgaactggaacgaaatctttaatatcctcgcgacgtaccagaacgaaaaagataaaaagaaaaaggcggcgatcaaaaaggacctggagaagctccaaagcggtgcacgtaaaaagattgttgaggcattcaaaaagaacccggattttgaaaaactgttcaaagagggtctgtttaaagagttgctgcctgaactgatcaaaagcgcaccggttgatgaaatcgcggttaaaaccaaggcgctggaatgcttcaaccgttttagcacctatttcacgggtttccacgacaatcgcaaaaacatgtactcggaagaagctaaatctaccgcaattagctatcgcatcgtgaacgaaaatttcccgaaattttttgccaatatcaagttgttcaactatctgaaagagcactttccgcgaatcatcattgataccgaagagtccctgaaagactatttgaagggcaaaaagctggattctgtatttagcattgacggctttaacagcgtgctggcgcagagcgggattgatttctataacaccgtgataggcggtatttcaggtgaggccggcaccaaaaaaacgcagggtcttaacgagaagattaacttagcgcgccagcaattatccaaggaggagaagaacaagctgcgcggtaaaatggtggtgctgtttaaacagatcttgtctgatcgtgaaaccagcagctttatcccagtgggttttgccaacaaggaggaggtgtactctacggtgaaagaattcaacaactcgattgccgaaaaggcggtgtccaaggtgcgtgatctattcctgcaccgcgaagaattcacgctaaacgagattttcgtcccggcaaagagcttgaccgacttcagtcaggccatcttcggatcctggtctattttgagtgagggcctgttcctgctggagaaggacagcatgaaaaaggctctaagcgaatcccaagaagaaaagatcaataaggagattgcgaaaaaagactgctcctttaccgaactacaactggcgtacgagcgctactgcaccgagcacaacttgccggttgaaaaattctgcaaagactacttcgacatcgtcgattacaggggaaacggtgcgaaaagcgaaaaaacaaaagtgagcatcctgagcgaaatcctggaaacctttttacaattggactttgaccacattcaggacctgcaacaagaaaagaacgctgcgattcctatcaaagcatatcttgacgaagttcagaatttgtaccaccacctgaagttggtcgattatcgtggcgaagagcagaaagactcaaccttttatagcaaacacgatgaaatcctgaccgatctttctcagatcgtcccattgtataataaagtccgtaactttgttaccaaaaaactgggtgagagcaaaaagatcaagctgaacttcgattgcccgactctggctaatggctgggatgagaatcaagagtccagcaacgatgcaattatcctgagaaaggacggcaaatactatctgggcatttacaacccgaacaacaaaccgaaattcgcgaagaaggacagcatcgtgggtgattgctatgaaaaaatggcatacaagcaaatcgcactgccgatgggtttgggtgcatttgtgcgcaaatgctttggcaccgctcagaaatacggttggggttgcccggagaattgcctgaacagcgagggtaaaattatcatcaaagacgaggaggcgaagggtaatctggaggcaatcatcgactgttacaaagattttctgaacaagtacgaaaaggacggcttcaagtacaaggactacaatttttccttcctggactctgccagctatgaaaaactgtctgatttcttcaacgacgttaaaccgcagggctataagctgagctttacgtccatcccactgtcagagatcgataagatgattgatgaaggtaaactgtttttgtttcagatatataacaaagacttcgcgaagaaggcgacggggaagaagaacctgcataccctttattgggaaaacctattctcagtcgagaatctgcaagatgtggtgttgaagctcaatggcgaagccgagctgttctggcgtgaggctagcatcaaaaaggacaaggtgatcgttcacaaaaaaggttctattctggtgaatcgtaccaccacggatggtaagagcatcccggaggccatttatcaagaaatctatcaattaaaaaacaaaatggcggattccatcagcgacgaagcgaaacgccttctagagtccggcaccgttgtctgtaaagtcgccactcatgatatcgttaaggataaacattttactgaaaacacgtatctgttccattgtccgattaccatgaacttcaaggcaaaagaccgtaccaataaggaatttaacaatcatgttctggaggttcttaacaagaatccggatattaaggtgatcggcttagaccgtggcgaacgtcatctgctgtacctgagcctgatcaatcagaagggtgaaattgagtgccagaaaacgctgaacctagttgagcaagttcgtaatgataagaccgtttccgttaattatcatgaaaaactggtgcacaaagaaggcagccgtgatgctgcgagaaaaaactggcagaccattggcaatattaaagagctgaaggagggctacctgtcggcggtggtgcacgagattgcgagtctgatggtaaagcacaatgcgatcgttgtaatggaagacctgaatttcggctttaagcgcggtcgttttgctgtggagcgtcagatctaccaaaagttcgaaaacatgctgattgagaagctgaactatctggtttttaaagaccgtaaagtgacggagccgggtggcgttctgaacgcgtaccagttggcgaacaagagcgcgaaggtgacagatgtttataaacaatgcggttggctgttctatatcccggcagcgtacaccagcaaaattgatccgcgtaccggtttcgcgaatctgttcattaccaagggtctgaccaatgttgagaagaagaaggagtttttcggcaagttcgactcgattcgttatgatgcgaccgagtcttgtttcgttttttccttcgactacgcaaagatttgtgacaatgctgattacaagaagaaatgggatgtttacacccgtggtactcgtctcgtttacaacaagaccgaacgcaagaacgtgagcgtcaacccaaccgaagagttgcagtgtgtttttgatgagttcggcatcaagtggaataccggcgaagacctgattgaatctattagcctgatcccggcggaaaagtccaacgcgaagttcttcgacgttttgttgcgtatgtttaacgcgactcttcagatgagaaacagcgtgccgaataccgacaccgactacttggtcagcccggtgaaagctgaagacggcagctttttcgacagccgcgaggagtttaagaaaggtggcgatgcccgcctgccgatagactgcggtgctaatggtgcgtaccatattgccctgaaaggcttgtacttgttgttgaatgatttcaaccgtgataacaagggcgtcatccaaaacatctctaacaaggactggtttaaattcgtgcaggagaaagtttacaaagactaa

SEQ ID NO: 147 - DNA, 3882 bp, synthetic construct
  source 1..3882: mol_type = other DNA
atggctaggataattgatgaattttgtggacagatgaatggatacagccgttccatcacgctgcgtaaccgcctggtgccgatcggcaagaccgaggaaaatctgaaacagtttctggagaaggacttagagcgcgcaactgcgtacccggacatcaaaaacctgattgacgctatccatcgtaatgtcattgaggacaccttaagcaaagtggccctgaactggaacgaaatctttaatatcctcgcgacgtaccagaacgaaaaagataaaaagaaaaaggcggcgatcaaaaaggacctggagaagctccaaagcggtgcacgtaaaaagattgttgaggcattcaaaaagaacccggattttgaaaaactgttcaaagagggtctgtttaaagagttgctgcctgaactgatcaaaagcgcaccggttgatgaaatcgcggttaaaaccaaggcgctggaatgcttcaaccgttttagcacctatttcacgggtttccacgacaatcgcaaaaacatgtactcggaagaagctaaatctaccgcaattagctatcgcatcgtgaacgaaaatttcccgaaattttttgccaatatcaagttgttcaactatctgaaagagcactttccgcgaatcatcattgataccgaagagtccctgaaagactatttgaagggcaaaaagctggattctgtatttagcattgacggctttaacagcgtgctggcgcagagcgggattgatttctataacaccgtgataggcggtatttcaggtgaggccggcaccaaaaaaacgcagggtcttaacgagaagattaacttagcgcgccagcaattatccaaggaggagaagaacaagctgcgcggtaaaatggtggtgctgtttaaacagatcttgtctgatcgtgaaaccagcagctttatcccagtgggttttgccaacaaggaggaggtgtactctacggtgaaagaattcaacaactcgattgccgaaaaggcggtgtccaaggtgcgtgatctattcctgcaccgcgaagaattcacgctaaacgagattttcgtcccggcaaagagcttgaccgacttcagtcaggccatcttcggatcctggtctattttgagtgagggcctgttcctgctggagaaggacagcatgaaaaaggctctaagcgaatcccaagaagaaaagatcaataaggagattgcgaaaaaagactgctcctttaccgaactacaactggcgtacgagcgctactgcaccgagcacaacttgccggttgaaaaattctgcaaagactacttcgacatcgtcgattacaggggaaacggtgcgaaaagcgaaaaaacaaaagtgagcatcctgagcgaaatcctggaaacctttttacaattggactttgaccacattcaggacctgcaacaagaaaagaacgctgcgattcctatcaaagcatatcttgacgaagttcagaatttgtaccaccacctgaagttggtcgattatcgtggcgaagagcagaaagactcaaccttttatagcaaacacgatgaaatcctgaccgatctttctcagatcgtcccattgtataataaagtccgtaactttgttaccaaaaaactgggtgagagcaaaaagatcaagctgaacttcgattgcccgactctggctaatggctgggatgagaatcaagagtccagcaacgatgcaattatcctgagaaaggacggcaaatactatctgggcatttacaacccgaacaacaaaccgaaattcgcgaagaaggacagcatcgtgggtgattgctatgaaaaaatggcatacaagcaaatcgcactgccgatgggtttgggtgcatttgtgcgcaaatgctttggcaccgctcagaaatacggttggggttgcccggagaattgcctgaacagcgagggtaaaattatcatcaaagacgaggaggcgaagggtaatctggaggcaatcatcgactgttacaaagattttctgaacaagtacgaaaaggacggcttcaagtacaaggactacaatttttccttcctggactctgccagctatgaaaaactgtctgatttcttcaacgacgttaaaccgcagggctataagctgagctttacgtccatcccactgtcagagatcgataagatgattgatgaaggtaaactgtttttgtttcagatatataacaaagacttcgcgaagaaggcgacggggaagaagaacctgcataccctttattgggaaaacctattctcagtcgagaatctgcaagatgtggtgttgaagctcaatggcgaagccgagctgttctggcgtgaggctagcatcaaaaaggacaaggtgatcgttcacaaaaaaggttctattctggtgaatcgtaccaccacggatggtaagagcatcccggaggccatttatcaagaaatctatcaattaaaaaacaaaatggcggattccatcagcgacgaagcgaaacgccttctagagtccggcaccgttgtctgtaaagtcgccactcatgatatcgttaaggataaacattttactgaaaacacgtatctgttccattgtccgattaccatgaacttcaaggcaaaagaccgtaccaataaggaatttaacaatcatgttctggaggttcttaacaagaatccggatattaaggtgatcggcttagaccgtggcgaacgtcatctgctgtacctgagcctgatcaatcagaagggtgaaattgagtgccagaaaacgctgaacctagttgagcaagttcgtaatgataagaccgtttccgttaattatcatgaaaaactggtgcacaaagaaggcagccgtgatgctgcgagaaaaaactggcagaccattggcaatattaaagagctgaaggagggctacctgtcggcggtggtgcacgagattgcgagtctgatggtaaagcacaatgcgatcgttgtaatggaagacctgaatttcggctttaagcgcggtcgttttgctgtggagcgtcagatctaccaaaagttcgaaaacatgctgattgagaagctgaactatctggtttttaaagaccgtaaagtgacggagccgggtggcgttctgaacgcgtaccagttggcgaacaagagcgcgaaggtgacagatgtttataaacaatgcggttggctgttctatatcccggcagcgtacaccagcaaaattgatccgcgtaccggtttcgcgaatctgttcattaccaagggtctgaccaatgttgagaagaagaaggagtttttcggcaagttcgactcgattcgttatgatgcgtccgagtcttgtttcgttttttccttcgactacgcaaagatttgtgacaatgctgattacaagaagaaatgggatgtttacacccgtggtactcgtctcgtttacaacaagaccgaacgcaagaacgtgagcgtcaacccaaccgaagagttgcagtgtgtttttgatgagttcggcatcaagtggaataccggcgaagacctgattgaatctattagcctgatcccggcggaaaagtccaacgcgaagttcttcgacgttttgttgcgtatgtttaacgcgactcttcagatgagaaacagcgtgccgaataccgacaccgactacttggtcagcccggtgaaagctgaagacggcagctttttcgacagccgcgaggagtttaagaaaggtggcgatgcccgcctgccgatagactgcgatgctaatggtgcgtaccatattgccctgaaaggcttgtacttgttgttgaatgatttcaaccgtgataacaagggcgtcatccaaaacatctctaacaaggactggtttaaattcgtgcaggagaaagtttacaaagactaa

SEQ ID NO: 148 - DNA, 3882 bp, synthetic construct
  source 1..3882: mol_type = other DNA
atggctaggataattgatgaattttgtggacagatgaatggatacagccgttccatcacgctgcgtaaccgcctggtgccgatcggcaagaccgaggaaaatctgaaacagtttctggagaaggacttagagcgcgcaactgcgtacccggacatcaaaaacctgattgacgctatccatcgtaatgtcattgaggacaccttaagcaaagtggccctgaactggaacgaaatctttaatatcctcgcgacgtaccagaacgaaaaagataaaaagaaaaaggcggcgatcaaaaaggacctggagaagctccaaagcggtgcacgtaaaaagattgttgaggcattcaaaaagaacccggattttgaaaaactgttcaaagagggtctgtttaaagagttgctgcctgaactgatcaaaagcgcaccggttgatgaaatcgcggttaaaaccaaggcgctggaatgcttcaaccgttttagcacctatttcacgggtttccacgacaatcgcaaaaacatgtactcggaagaagctaaatctaccgcaattagctatcgcatcgtgaacgaaaatttcccgaaattttttgccaatatcaagttgttcaactatctgaaagagcactttccgcgaatcatcattgataccgaagagtccctgaaagactatttgaagggcaaaaagctggattctgtatttagcattgacggctttaacagcgtgctggcgcagagcgggattgatttctataacaccgtgataggcggtatttcaggtgaggccggcaccaaaaaaacgcagggtcttaacgagaagattaacttagcgcgccagcaattatccaaggaggagaagaacaagctgcgcggtaaaatggtggtgctgtttaaacagatcttgtctgatcgtgaaaccagcagctttatcccagtgggttttgccaacaaggaggaggtgtactctacggtgaaagaattcaacaactcgattgccgaaaaggcggtgtccaaggtgcgtgatctattcctgcaccgcgaagaattcacgctaaacgagattttcgtcccggcaaagagcttgaccgacttcagtcaggccatcttcggatcctggtctattttgagtgagggcctgttcctgctggagaaggacagcatgaaaaaggctctaagcgaatcccaagaagaaaagatcaataaggagattgcgaaaaaagactgctcctttaccgaactacaactggcgtacgagcgctactgcaccgagcacaacttgccggttgaaaaattctgcaaagactacttcgacatcgtcgattacaggggaaacggtgcgaaaagcgaaaaaacaaaagtgagcatcctgagcgaaatcctggaaacctttttacaattggactttgaccacattcaggacctgcaacaagaaaagaacgctgcgattcctatcaaagcatatcttgacgaagttcagaatttgtaccaccacctgaagttggtcgattatcgtggcgaagagcagaaagactcaaccttttatagcaaacacgatgaaatcctgaccgatctttctcagatcgtcccattgtataataaagtccgtaactttgttaccaaaaaactgggtgagagcaaaaagatcaagctgaacttcgattgcccgactctggctaatggctgggatgagaatcaagagtccagcaacgatgcaattatcctgagaaaggacggcaaatactatctgggcatttacaacccgaacaacaaaccgaaattcgcgaagaaggacagcatcgtgggtgattgctatgaaaaaatggcatacaagcaaatcgcactgccgatgggtttgggtgcatttgtgcgcaaatgctttggcaccgctcagaaatacggttggggttgcccggagaattgcctgaacagcgagggtaaaattatcatcaaagacgaggaggcgaagggtaatctggaggcaatcatcgactgttacaaagattttctgaacaagtacgaaaaggacggcttcaagtacaaggactacaatttttccttcctggactctgccagctatgaaaaactgtctgatttcttcaacgacgttaaaccgcagggctataagctgagctttacgtccatcccactgtcagagatcgataagatgattgatgaaggtaaactgtttttgtttcagatatataacaaagacttcgcgaagaaggcgacggggaagaagaacctgcataccctttattgggaaaacctattctcagtcgagaatctgcaagatgtggtgttgaagctcaatggcgaagccgagctgttctggcgtgaggctagcatcaaaaaggacaaggtgatcgttcacaaaaaaggttctattctggtgaatcgtaccaccacggatggtaagagcatcccggaggccatttatcaagaaatctatcaattaaaaaacaaaatggcggattccatcagcgacgaagcgaaacgccttctagagtccggcaccgttgtctgtaaagtcgccactcatgatatcgttaaggataaacattttactgaaaacacgtatctgttccattgtccgattaccatgaacttcaaggcaaaagaccgtaccaataaggaatttaacaatcatgttctggaggttcttaacaagaatccggatattaaggtgatcggcttagaccgtggcgaacgtcatctgctgtacctgagcctgatcaatcagaagggtgaaattgagtgccagaaaacgctgaacctagttgagcaagttcgtaatgataagaccgtttccgttaattatcatgaaaaactggtgcacaaagaaggcagccgtgatgctgcgagaaaaaactggcagaccattggcaatattaaagagctgaaggagggctacctgtcggcggtggtgcacgagattgcgagtctgatggtaaagcacaatgcgatcgttgtaatggaagacctgaatttcggctttaagcgcggtcgttttgctgtggagcgtcagatctaccaaaagttcgaaaacatgctgattgagaagctgaactatctggtttttaaagaccgtaaagtgacggagccgggtggcgttctgaacgcgtaccagttggcgaacaagagcgcgaaggtgacagatgtttataaacaatgcggttggctgttctatatcccggcagcgtacaccagcaaaattgatccgcgtaccggtttcgcgaatctgttcattaccaagggtctgaccaatgttgagaagaagaaggagtttttcggcaagttcgactcgattcgttatgatgcgaccgagtcttgtttcgttttttccttcgactacgcaaagatttgtgacaatgctgattacaagaagaaatgggatgtttacacccgtggtactcgtctcgtttacaacaagaccgaacgcaagaacgtgagcgtcaacccaaccgaagagttgcagtgtgtttttgatgagttcggcatcaagtggaataccggcgaagacctgattgaatctattagcctgatcccggcggaaaagtccaacgcgaagttcttcgacgttttgttgcgtatgtttaacgcgactcttcagatgagaaacagcgtgccgaataccgacaccgactacttggtcagcccggtgaaagctgaagacggcagctttttcgacagccgcgaggagtttaagaaaggtggcgatgcccgcctgccgatagactgcgatgctaatggtgcgtaccatattgccctgaaaggcttgtacttgttgttgaatgatttcaaccgtgataacaagggcgtcatccaaaacatctctaacaaggactggtttagattcgtgcaggagaaagtttacaaagactaa

SEQ ID NO: 149 - DNA, 3882 bp, synthetic construct
  source 1..3882: mol_type = other DNA
atggctaggataattgatgaattttgtggacagatgaatggatacagccgttccatcacgctgcgtaaccgcctggtgccgatcggcaagaccgaggaaaatctgaaacagtttctggagaaggacttagagcgcgcaactgcgtacccggacatcaaaaacctgattgacgctatccatcgtaatgtcattgaggacaccttaagcaaagtggccctgaactggaacgaaatctttaatatcctcgcgacgtaccagaacgaaaaagataaaaagaaaaaggcggcgatcaaaaaggacctggagaagctccaaagcggtgcacgtaaaaagattgttgaggcattcaaaaagaacccggattttgaaaaactgttcaaagagggtctgtttaaagagttgctgcctgaactgatcaaaagcgcaccggttgatgaaatcgcggttaaaaccaaggcgctggaatgcttcaaccgttttagcacctatttcacgggtttccacgacaatcgcaaaaacatgtactcggaagaagctaaatctaccgcaattagctatcgcatcgtgaacgaaaatttcccgaaattttttgccaatatcaagttgttcaactatctgaaagagcactttccgcgaatcatcattgataccgaagagtccctgaaagactatttgaagggcaaaaagctggattctgtatttagcattgacggctttaacagcgtgctggcgcagagcgggattgatttctataacaccgtgataggcggtatttcaggtgaggccggcaccaaaaaaacgcagggtcttaacgagaagattaacttagcgcgccagcaattatccaaggaggagaagaacaagctgcgcggtaaaatggtggtgctgtttaaacagatcttgtctgatcgtgaaaccagcagctttatcccagtgggttttgccaacaaggaggaggtgtactctacggtgaaagaattcaacaactcgattgccgaaaaggcggtgtccaaggtgcgtgatctattcctgcaccgcgaagaattcacgctaaacgagattttcgtcccggcaaagagcttgaccgacttcagtcaggccatcttcggatcctggtctattttgagtgagggcctgttcctgctggagaaggacagcatgaaaaaggctctaagcgaatcccaagaagaaaagatcaataaggagattgcgaaaaaagactgctcctttaccgaactacaactggcgtacgagcgctactgcaccgagcacaacttgccggttgaaaaattctgcaaagactacttcgacatcgtcgattacaggggaaacggtgcgaaaagcgaaaaaacaaaagtgagcatcctgagcgaaatcctggaaacctttttacaattggactttgaccacattcaggacctgcaacaagaaaagaacgctgcgattcctatcaaagcatatcttgacgaagttcagaatttgtaccaccacctgaagttggtcgattatcgtggcgaagagcagaaagactcaaccttttatagcaaacacgatgaaatcctgaccgatctttctcagatcgtcccattgtataataaagtccgtaactttgttaccaaaaaactgggtgagagcaaaaagatcaagctgaacttcgattgcccgactctggctaatggctgggatgagaatcaagagtccagcaacgatgcaattatcctgagaaaggacggcaaatactatctgggcatttacaacccgaacaacaaaccgaaattcgcgaagaaggacagcatcgtgggtgattgctatgaaaaaatggcatacaagcaaatcgcactgccgatgggtttgggtgcatttgtgcgcaaatgctttggcaccgctcagaaatacggttggggttgcccggagaattgcctgaacagcgagggtaaaattatcatcaaagacgaggaggcgaagggtaatctggaggcaatcatcgactgttacaaagattttctgaacaagtacgaaaaggacggcttcaagtacaaggactacaatttttccttcctggactctgccagctatgaaaaactgtctgatttcttcaacgacgttaaaccgcagggctataagctgagctttacgtccatcccactgtcagagatcgataagatgattgatgaaggtaaactgtttttgtttcagatatataacaaagacttcgcgaagaaggcgacggggaagaagaacctgcataccctttattgggaaaacctattctcagtcgagaatctgcaagatgtggtgttgaagctcaatggcgaagccgagctgttctggcgtgaggctagcatcaaaaaggacaaggtgatcgttcacaaaaaaggttctattctggtgaatcgtaccaccacggatggtaagagcatcccggaggccatttatcaagaaatctatcaattaaaaaacaaaatggcggattccatcagcgacgaagcgaaacgccttctagagtccggcaccgttgtctgtaaagtcgccactcatgatatcgttaaggataaacattttactgaaaacacgtatctgttccattgtccgattaccatgaacttcaaggcaaaagaccgtaccaataaggaatttaacaatcatgttctggaggttcttaacaagaatccggatattaaggtgatcggcttagaccgtggcgaacgtcatctgctgtacctgagcctgatcaatcagaagggtgaaattgagtgccagaaaacgctgaacctagttgagcaagatcgtaatgataagaccgtttccgttaattatcatgaaaaactggtgcacaaagaaggcagccgtgatgctgcgagaaaaaactggcagaccattggcaatattaaagagctgaaggagggctacctgtcggcggtggtgcacgagattgcgagtctgatggtaaagcacaatgcgatcgttgtaatggaagacctgaatttcggctttaagcgcggtcgttttgctgtggagcgtcagatctaccaaaagttcgaaaacatgctgattgagaagctgaactatctggtttttaaagaccgtaaagtgacggagccgggtggcgttctgaacgcgtaccagttggcgaacaagagcgcgaaggtgacagatgtttataaacaatgcggttggctgttctatatcccggcagcgtacaccagcaaaattgatccgcgtaccggtttcgcgaatctgttcattaccaagggtctgaccaatgttgagaagaagaaggagtttttcggcaagttcgactcgattcgttatgatgcgaccgagtcttgtttcgttttttccttcgactacgcaaagatttgtgacaatgctgattacaagaagaaatgggatgtttacacccgtggtactcgtctcgtttacaacaagaccgaacgcaagaacgtgagcgtcaacccaaccgaagagttgcagtgtgtttttgatgagttcggcatcaagtggaataccggcgaagacctgattgaatctattagcctgatcccggcggaaaagtccaacgcgaagttcttcgacgttttgttgcgtatgtttaacgcgactcttcagatgagaaacagcgtgccgaataccgacaccgactacttggtcagcccggtgaaagctgaagacggcagctttttcgacagccgcgaggagtttaagaaaggtggcgatgcccgcctgccgatagactgcgatgctaatggtgcgtaccatattgccctgaaaggcttgtacttgttgttgaatgatttcaaccgtgataacaagggcgtcatccaaaacatctctaacaaggactggtttaaattcgtgcaggagaaagtttacaaagactaa

SEQ ID NO: 150 - DNA, 3882 bp, synthetic construct
  source 1..3882: mol_type = other DNA
atggctaggataattgatgaattttgtggacagatgaatggatacagccgttccatcacgctgcgtaaccgcctggtgccgatcggcaagaccgaggaaaatctgaaacagtttctggagaaggacttagagcgcgcaactgcgtacccggacatcaaaaacctgattgacgctatccatcgtaatgtcattgaggacaccttaagcaaagtggccctgaactggaacgaaatctttaatatcctcgcgacgtaccagaacgaaaaagataaaaagaaaaaggcggcgatcaaaaaggacctggagaagctccaaagcggtgcacgtaaaaagattgttgaggcattcaaaaagaacccggattttgaaaaactgttcaaagagggtctgtttaaagagttgctgcctgaactgatcaaaagcgcaccggttgatgaaatcgcggttaaaaccaaggcgctggaatgcttcaaccgttttagcacctatttcacgggtttccacgacaatcgcaaaaacatgtactcggaagaagctaaatctaccgcaattagctatcgcatcgtgaacgaaaatttcccgaaattttttgccaatatcaagttgttcaactatctgaaagagcactttccgcgaatcatcattgataccgaagagtccctgaaagactatttgaagggcaaaaagctggattctgtatttagcattgacggctttaacagcgtgctggcgcagagcgggattgatttctataacaccgtgataggcggtatttcaggtgaggccggcaccaaaaaaacgcagggtcttaacgagaagattaacttagcgcgccagcaattatccaaggaggagaagaacaagctgcgcggtaaaatggtggtgctgtttaaacagatcttgtctgatcgtgaaaccagcagctttatcccagtgggttttgccaacaaggaggaggtgtactctacggtgaaagaattcaacaactcgattgccgaaaaggcggtgtccaaggtgcgtgatctattcctgcaccgcgaagaattcacgctaaacgagattttcgtcccggcaaagagcttgaccgacttcagtcaggccatcttcggatcctggtctattttgagtgagggcctgttcctgctggagaaggacagcatgaaaaaggctctaagcgaatcccaagaagaaaagatcaataaggagattgcgaaaaaagactgctcctttaccgaactacaactggcgtacgagcgctactgcaccgagcacaacttgccggttgaaaaattctgcaaagactacttcgacatcgtcgattacaggggaaacggtgcgaaaagcgaaaaaacaaaagtgagcatcctgagcgaaatcctggaaacctttttacaattggactttgaccacattcaggacctgcaacaagaaaagaacgctgcgattcctatcaaagcatatcttgacgaagttcagaatttgtaccaccacctgaagttggtcgattatcgtggcgaagagcagaaagactcaaccttttatagcaaacacgatgaaatcctgaccgatctttctcagatcgtcccattgtataataaagtccgtaactttgttaccaaaaaactgggtgagagcaaaaagatcaagctgaacttcgattgcccgactctggctaatggctgggatgagaatcaagagtccagcaacgatgcaattatcctgagaaaggacggcaaatactatctgggcatttacaacccgaacaacaaaccgaaattcgcgaagaaggacagcatcgtgggtgattgctatgaaaaaatggcatacaagcaaatcgcactgccgatgggtttgggtgcatttgtgcgcaaatgctttggcaccgctcagaaatacggttggggttgcccggagaattgcctgaacagcgagggtaaaattatcatcaaagacgaggaggcgaagggtaatctggaggcaatcatcgactgttacaaagattttctgaacaagtacgaaaaggacggcttcaagtacaaggactacaatttttccttcctggactctgccagctatgaaaaactgtctgatttcttcaacgacgttaaaccgcagggctataagctgagctttacgtccatcccactgtcagagatcgataagatgattgatgaaggtaaactgtttttgtttcagatatataacaaagacttcgcgaagaaggcgacggggaagaagaacctgcataccctttattgggaaaacctattctcagtcgagaatctgcaagatgtggtgttgaagctcaatggcgaagccgagctgttctggcgtgaggctagcatcaaaaaggacaaggtgatcgttcacaaaaaaggttctattctggtgaatcgtaccaccacggatggtaagagcatcccggaggccatttatcaagaaatctatcaattaaaaaacaaaatggcggattccatcagcgacgaagcgaaacgccttctagagtccggcaccgttgtctgtaaagtcgccactcatgatatcgttaaggataaacattttactgaaaacacgtatctgttccattgtccgattaccatgaacttcaaggcaaaagaccgtaccaataaggaatttaacaatcatgttctggaggttcttaacaagaatccggatattaaggtgatcggcttagaccgtggcgaacgtcatctgctgtacctgagcctgatcaatcagaagggtgaaattgagtgccagaaaacgctgaacctagttgagcaagttcgtaatgataagaccgtttccgttaattatcatgaaaaactggtgcacaaagaaggcagccgtgatgctgcgagaaaaaactggcagaccattggcaatattaaagagctgaaggagggctacctgtcggcggtggtgcacgagattgcgagtctgatggtaaagcacaatgcgatcgttgtaatggaagacctgaatttcggctttaagcgcggtcgttttgctgtggagcgtcagatctaccaaaagttcgaaaacatgctgattgagaagctgaactatctggtttttaaagaccgtaaagtgacggagccgggtggcgttctgaacgcgtaccagttggcgaacaagagcgcgaaggtgacagatgtttataaacaatgcggttggctgttctatatcccggcagcgtacaccagcaaaattgatccgcgtaccggtttcgcgaatctgttcattaccaagggtctgaccaatgttgagaagaagaaggagtttttcggcaagttcgactcgattcgttatgatgcgaccgagtcttgtttcgttttttccttcgactacgcaaagatttgtgacaatgctgattacaagaagaaatgggatgtttacacccgtggtactcgtctcgtttacaacaagaccgaacgcaagaacgtgagcgtcaacccaaccgaagagttgcagtgtgtttttgatgagttcggcatcaagtggaataccggcgaagacctgattgaatctattagcctgatcccggcggaaaagtccaacgcgaagttcttcgaggttttgttgcgtatgtttaacgcgactcttcagatgagaaacagcgtgccgaataccgacaccgactacttggtcagcccggtgaaagctgaagacggcagctttttcgacagccgcgaggagtttaagaaaggtggcgatgcccgcctgccgatagactgcgatgctaatggtgcgtaccatattgccctgaaaggcttgtacttgttgttgaatgatttcaaccgtgataacaagggcgtcatccaaaacatctctaacaaggactggtttaaattcgtgcaggagaaagtttacaaagactaa

SEQ ID NO: 151 - DNA, 3882 bp, synthetic construct
  source 1..3882: mol_type = other DNA
atggctaggataattgatgaattttgtggacagatgaatggatacagccgttccatcacgctgcgtaaccgcctggtgccgatcggcaagaccgaggaaaatctgaaacagtttctggagaaggacttagagcgcgcaactgcgtacccggacatcaaaaacctgattgacgctatccatcgtaatgtcattgaggacaccttaagcaaagtggccctgaactggaacgaaatctttaatatcctcgcgacgtaccagaacgaaaaagataaaaagaaaaaggcggcgatcaaaaaggacctggagaagctccaaagcggtgcacgtaaaaagattgttgaggcattcaaaaagaacccggattttgaaaaactgttcaaagagggtctgtttaaagagttgctgcctgaactgatcaaaagcgcaccggttgatgaaatcgcggttaaaaccaaggcgctggaatgcttcaaccgttttagcacctatttcacgggtttccacgacaatcgcaaaaacatgtactcggaagaagctaaatctaccgcaattagctatcgcatcgtgaacgaaaatttcccgaaattttttgccaatatcaagttgttcaactatctgaaagagcactttccgcgaatcatcattgataccgaagagtccctgaaagactatttgaagggcaaaaagctggattctgtatttagcattgacggctttaacagcgtgctggcgcagagcgggattgatttctataacaccgtgataggcggtatttcaggtgaggccggcaccaaaaaaacgcagggtcttaacgagaagattaacttagcgcgccagcaattatccaaggaggagaagaacaagctgcgcggtaaaatggtggtgctgtttaaacagatcttgtctgatcgtgaaaccagcagctttatcccagtgggttttgccaacaaggaggaggtgtactctacggtgaaagaattcaacaactcgattgccgaaaaggcggtgtccaaggtgcgtgatctattcctgcaccgcgaagaattcacgctaaacgagattttcgtcccggcaaagagcttgaccgacttcagtcaggccatcttcggatcctggtctattttgagtgagggcctgttcctgctggagaaggacagcatgaaaaaggctctaagcgaatcccaagaagaaaagatcaataaggagattgcgaaaaaagactgctcctttaccgaactacaactggcgtacgagcgctactgcaccgagcacaacttgccggttgaaaaattctgcaaagactacttcgacatcgtcgattacaggggaaacggtgcgaaaagcgaaaaaacaaaagtgagcatcctgagcgaaatcctggaaacctttttacaattggactttgaccacattcaggacctgcaacaagaaaagaacgctgcgattcctatcaaagcatatcttgacgaagttcagaatttgtaccaccacctgaagttggtcgattatcgtggcgaagagcagaaagactcaaccttttatagcaaacacgatgaaatcctgaccgatctttctcagatcgtcccattgtataataaagtccgtaactttgttaccaaaaaactgggtgagagcaaaaagatcaagctgaacttcgattgcccgactctggctaatggctgggatgagaatcaagagtccagcaacgatgcaattatcctgagaaaggacggcaaatactatctgggcatttacaacccgaacaacaaaccgaaattcgcgaagaaggacagcatcgtgggtgattgctatgaaaaaatggcatacaagcaaatcgcactgccgatgggtttgggtgcatttgtgcgcaaatgctttggcaccgctcagaaatacggttggggttgcccggagaattgcctgaacagcgagggtaaaattatcatcaaagacgaggaggcgaagggtaatctggaggcaatcatcgactgttacaaagattttctgaacaagtacgaaaaggacggcttcaagtacaaggactacaatttttccttcctggactctgccagctatgaaaaactgtctgatttcttcaacgacgttaaaccgcagggctataagctgagctttacgtccatcccactgtcagagatcgataagatgattgatgaaggtaaactgtttttgtttcagatatataacaaagacttcgcgaagaaggcgacggggaagaagaacctgcataccctttattgggaaaacctattctcagtcgagaatctgcaagatgtggtgttgaagctcaatggcgaagccgagctgttctggcgtgaggctagcatcaaaaaggacaaggtgatcgttcacaaaaaaggttctattctggtgaatcgtaccaccacggatggtaagagcatcccggaggccatttatcaagaaatctatcaattaaaaaacaaaatggcggattccatcagcgacgaagcgaaacgccttctagagtccggcaccgttgtctgtaaagtcgccactcatgatatcgttaaggataaacattttactgaaaacacgtatctgttccattgtccgattaccatgaacttcaaggcaaaagaccgtaccaataaggaatttaacaatcatgttctggaggttcttaacaagaatccggatattaaggtgatcggcttagaccgtggcgaacgtcatctgctgtacctgagcctgatcaatcagaagggtgaaattgagtgccagaaaacgctgaacctagttgagcaagttcgtaatgataagaccgtttccgttaattatcatgaaaaactggtgcacaaagaaggcagccgtgatgctgcgagaaaaaactggcagaccattggcaatattaaagagctgaaggagggctacctgtcggcggtggtgcacgagattgcgagtctgatggtaaagcacaatgcgatcgttgtaatggaagacctgaatttcggctttaagcgcggtcgttttgctgtggagcgtcagatctaccaaaagttcgaaaacatgctgattgagaagctgaactatctggtttttaaagaccgtaaagtgacggagccgggtggcgttctgaacgcgtaccagttggcgaacaagagcgcgaaggtgacagatgtttataaacaatgcggttggctgttctatatcccggcagcgtacaccagcaaaattgatccgcgtaccggtttcgcgaatctgttcattaccaagggtctgaccaatgttgagaagaagaaggagtttttcggcaagttcgactcgattcgttatgatgcgaccgagtcttgtttcgttttttccttcgactacgcaaagatttgtgacaatgctgattacaagaagaaatgggatgtttacacccgtggtactcgtctcgtttacaacaagaccgaacgcaagaacgtgagcgtcaacccaaccgaagagttgcagtgtgtttttgatgagttcggcatcaagtggaataccggcgaagacctgattgaatctattagcctgatcccggcggaaaagtccaacgcgaagttcttcgacgttttgttgcgtatgtttaacgcgactcttcatatgagaaacagcgtgccgaataccgacaccgactacttggtcagcccggtgaaagctgaagacggcagctttttcgacagccgcgaggagtttaagaaaggtggcgatgcccgcctgccgatagactgcgatgctaatggtgcgtaccatattgccctgaaaggcttgtacttgttgttgaatgatttcaaccgtgataacaagggcgtcatccaaaacatctctaacaaggactggtttaaattcgtgcaggagaaagtttacaaagactaa

SEQ ID NO: 152 - DNA, 3882 bp, synthetic construct
  source 1..3882: mol_type = other DNA
atggctaggataattgatgaattttgtggacagatgaatggatacagccgttccatcacgctgcgtaaccgcctggtgccgatcggcaagaccgaggaaaatctgaaacagtttctggagaaggacttagagcgcgcaactgcgtacccggacatcaaaaacctgattgacgctatccatcgtaatgtcattgaggacaccttaagcaaagtggccctgaactggaacgaaatctttaatatcctcgcgacgtaccagaacgaaaaagataaaaagaaaaaggcggcgatcaaaaaggacctggagaagctccaaagcggtgcacgtaaaaagattgttgaggcattcaaaaagaacccggattttgaaaaactgttcaaagagggtctgtttaaagagttgctgcctgaactgatcaaaagcgcaccggttgatgaaatcgcggttaaaaccaaggcgctggaatgcttcaaccgttttagcacctatttcacgggtttccacgacaatcgcaaaaacatgtactcggaagaagctaaatctaccgcaattagctatcgcatcgtgaacgaaaatttcccgaaattttttgccaatatcaagttgttcaactatctgaaagagcactttccgcgaatcatcattgataccgaagagtccctgaaagactatttgaagggcaaaaagctggattctgtatttagcattgacggctttaacagcgtgctggcgcagagcgggattgatttctataacaccgtgataggcggtatttcaggtgaggccggcaccaaaaaaacgcagggtcttaacgagaagattaacttagcgcgccagcaattatccaaggaggagaagaacaagctgcgcggtaaaatggtggtgctgtttaaacagatcttgtctgatcgtgaaaccagcagctttatcccagtgggttttgccaacaaggaggaggtgtactctacggtgaaagaattcaacaactcgattgccgaaaaggcggtgtccaaggtgcgtgatctattcctgcaccgcgaagaattcacgctaaacgagattttcgtcccggcaaagagcttgaccgacttcagtcaggccatcttcggatcctggtctattttgagtgagggcctgttcctgctggagaaggacagcatgaaaaaggctctaagcgaatcccaagaagaaaagatcaataaggagattgcgaaaaaagactgctcctttaccgaactacaactggcgtacgagcgctactgcaccgagcacaacttgccggttgaaaaattctgcaaagactacttcgacatcgtcgattacaggggaaacggtgcgaaaagcgaaaaaacaaaagtgagcatcctgagcgaaatcctggaaacctttttacaattggactttgaccacattcaggacctgcaacaagaaaagaacgctgcgattcctatcaaagcatatcttgacgaagttcagaatttgtaccaccacctgaagttggtcgattatcgtggcgaagagcagaaagactcaaccttttatagcaaacacgatgaaatcctgaccgatctttctcagatcgtcccattgtataataaagtccgtaactttgttaccaaaaaactgggtgagagcaaaaagatcaagctgaacttcgattgcccgactctggctaatggctgggatgagaatcaagagtccagcaacgatgcaattatcctgagaaaggacggcaaatactatctgggcatttacaacccgaacaacaaaccgaaattcgcgaagaaggacagcatcgtgggtgattgctatgaaaaaatggcatacaagcaaatcgcactgccgatgggtttgggtgcatttgtgcgcaaatgctttggcaccgctcagaaatacggttggggttgcccggagaattgcctgaacagcgagggtaaaattatcatcaaagacgaggaggcgaagggtaatctggaggcaatcatcgactgttacaaagattttctgaacaagtacgaaaaggacggcttcaagtacaaggactacaatttttccttcctggactctgccagctatgaaaaactgtctgatttcttcaacgacgttaaaccgcagggctataagctgagctttacgtccatcccactgtcagagatcgataagatgattgatgaaggtaaactgtttttgtttcagatatataacaaagacttcgcgaagaaggcgacggggaagaagaacctgcataccctttattgggaaaacctattctcagtcgagaatctgcaagatgtggtgttgaagctcaatggcgaagccgagctgttctggcgtgaggctagcatcaaaaaggacaaggtgatcgttcacaaaaaaggttctattctggtgaatcgtaccaccacggatggtaagagcatcccggaggccatttatcaagaaatctatcaattaaaaaacaaaatggcggattccatcagcgacgaagcgaaacgccttctagagtccggcaccgttgtctgtaaagtcgccactcatgatatcgttaaggataaacattttactgaaaacacgtatctgttccattgtccgattaccatgaacttcaaggcaaaagaccgtaccaataaggaatttaacaatcatgttctggaggttcttaacaagaatccggatattaaggtgatcggcttagaccgtggcgaacgtcatctgctgtacctgagcctgatcaatcagaagggtgaaattgagtgccagaaaacgctgaacctagttgagcaagttcgtaatgataagaccgtttccgttaattatcatgaaaaactggtgcacaaagaaggcagccgtgatgctgcgagaaaaaactggcagaccattggcaatattaaagagctgaaggagggctacctgtcggcggtggtgcacgagattgcgagtctgatggtaaagcacaatgcgatcgttgtaatggaagacctgaatttcggctttaagcgcggtcgttttgctgtggagcgtcagatctaccaaaagttcgaaaacatgctgattgagaagctgaactatctggtttttaaagaccgtaaagtgacggagccgggtggcgttctgaacgcgtaccagttggcgaacaagagcgcgaaggtgacagatgtttataaacaatgcggttggctgttctataacccggcagcgtacaccagcaaaattgatccgcgtaccggtttcgcgaatctgttcattaccaagggtctgaccaatgttgagaagaagaaggagtttttcggcaagttcgactcgattcgttatgatgcgaccgagtcttgtttcgttttttccttcgactacgcaaagatttgtgacaatgctgattacaagaagaaatgggatgtttacacccgtggtactcgtctcgtttacaacaagaccgaacgcaagaacgtgagcgtcaacccaaccgaagagttgcagtgtgtttttgatgagttcggcatcaagtggaataccggcgaagacctgattgaatctattagcctgatcccggcggaaaagtccaacgcgaagttcttcgacgttttgttgcgtatgtttaacgcgactcttcagatgagaaacagcgtgccgaataccgacaccgactacttggtcagcccggtgaaagctgaagacggcagctttttcgacagccgcgaggagtttaagaaaggtggcgatgcccgcctgccgatagactgcgatgctaatggtgcgtaccatattgccctgaaaggcttgtacttgttgttgaatgatttcaaccgtgataacaagggcgtcatccaaaacatctctaacaaggactggtttaaattcgtgcaggagaaagtttacaaagactaa

SEQ ID NO: 153 - DNA, 3882 bp, synthetic construct
  source 1..3882: mol_type = other DNA
atggctaggataattgatgaattttgtggacagatgaatggatacagccgttccatcacgctgcgtaaccgcctggtgccgatcggcaagaccgaggaaaatctgaaacagtttctggagaaggacttagagcgcgcaactgcgtacccggacatcaaaaacctgattgacgctatccatcgtaatgtcattgaggacaccttaagcaaagtggccctgaactggaacgaaatctttaatatcctcgcgacgtaccagaacgaaaaagataaaaagaaaaaggcggcgatcaaaaaggacctggagaagctccaaagcggtgcacgtaaaaagattgttgaggcattcaaaaagaacccggattttgaaaaactgttcaaagagggtctgtttaaagagttgctgcctgaactgatcaaaagcgcaccggttgatgaaatcgcggttaaaaccaaggcgctggaatgcttcaaccgttttagcacctatttcacgggtttccacgacaatcgcaaaaacatgtactcggaagaagctaaatctaccgcaattagctatcgcatcgtgaacgaaaatttcccgaaattttttgccaatatcaagttgttcaactatctgaaagagcactttccgcgaatcatcattgataccgaagagtccctgaaagactatttgaagggcaaaaagctggattctgtatttagcattgacggctttaacagcgtgctggcgcagagcgggattgatttctataacaccgtgataggcggtatttcaggtgaggccggcaccaaaaaaacgcagggtcttaacgagaagattaacttagcgcgccagcaattatccaaggaggagaagaacaagctgcgcggtaaaatggtggtgctgtttaaacagatcttgtctgatcgtgaaaccagcagctttatcccagtgggttttgccaacaaggaggaggtgtactctacggtgaaagaattcaacaactcgattgccgaaaaggcggtgtccaaggtgcgtgatctattcctgcaccgcgaagaattcacgctaaacgagattttcgtcccggcaaagagcttgaccgacttcagtcaggccatcttcggatcctggtctattttgagtgagggcctgttcctgctggagaaggacagcatgaaaaaggctctaagcgaatcccaagaagaaaagatcaataaggagattgcgaaaaaagactgctcctttaccgaactacaactggcgtacgagcgctactgcaccgagcacaacttgccggttgaaaaattctgcaaagactacttcgacatcgtcgattacaggggaaacggtgcgaaaagcgaaaaaacaaaagtgagcatcctgagcgaaatcctggaaacctttttacaattggactttgaccacattcaggacctgcaacaagaaaagaacgctgcgattcctatcaaagcatatcttgacgaagttcagaatttgtaccaccacctgaagttggtcgattatcgtggcgaagagcagaaagactcaaccttttatagcaaacacgatgaaatcctgaccgatctttctcagatcgtcccattgtataataaagtccgtaactttgttaccaaaaaactgggtgagagcaaaaagatcaagctgaacttcgattgcccgactctggctaatggctgggatgagaatcaagagtccagcaacgatgcaattatcctgagaaaggacggcaaatactatctgggcatttacaacccgaacaacaaaccgaaattcgcgaagaaggacagcatcgtgggtgattgctatgaaaaaatggcatacaagcaaatcgcactgccgatgggtttgggtgcatttgtgcgcaaatgctttggcaccgctcagaaatacggttggggttgcccggagaattgcctgaacagcgagggtaaaattatcatcaaagacgaggaggcgaagggtaatctggaggcaatcatcgactgttacaaagattttctgaacaagtacgaaaaggacggcttcaagtacaaggactacaatttttccttcctggactctgccagctatgaaaaactgtctgatttcttcaacgacgttaaaccgcagggctataagctgagctttacgtccatcccactgtcagagatcgataagatgattgatgaaggtaaactgtttttgtttcagatatataacaaagacttcgcgaagaaggcgacggggaagaagaacctgcataccctttattgggaaaacctattctcagtcgagaatctgcaagatgtggtgttgaagctcaatggcgaagccgagctgttctggcgtgaggctagcatcaaaaaggacaaggtgatcgttcacaaaaaaggttctattctggtgaatcgtaccaccacggatggtaagagcatcccggaggccatttatcaagaaatctatcaattaaaaaacaaaatggcggattccatcagcgacgaagcgaaacgccttctagagtccggcaccgttgtctgtaaagtcgccactcatgatatcgttaaggataaacattttactgaaaacacgtatctgttccattgtccgattaccatgaacttcaaggcaaaagaccgtaccaataaggaatttaacaatcatgttctggaggttcttaacaagaatccggatattaaggtgatcggcttagaccgtggcgaacgtcatctgctgtacctgagcctgatcaatcagaagggtgaaattgagtgccagaaaacgctgaacctagttgagcaagttcgtaatgatatgaccgtttccgttaattatcatgaaaaactggtgcacaaagaaggcagccgtgatgctgcgagaaaaaactggcagaccattggcaatattaaagagctgaaggagggctacctgtcggcggtggtgcacgagattgcgagtctgatggtaaagcacaatgcgatcgttgtaatggaagacctgaatttcggctttaagcgcggtcgttttgctgtggagcgtcagatctaccaaaagttcgaaaacatgctgattgagaagctgaactatctggtttttaaagaccgtaaagtgacggagccgggtggcgttctgaacgcgtaccagttggcgaacaagagcgcgaaggtgacagatgtttataaacaatgcggttggctgttctatatcccggcagcgtacaccagcaaaattgatccgcgtaccggtttcgcgaatctgttcattaccaagggtctgaccaatgttgagaagaagaaggagtttttcggcaagttcgactcgattcgttatgatgcgaccgagtcttgtttcgttttttccttcgactacgcaaagatttgtgacaatgctgattacaagaagaaatgggatgtttacacccgtggtactcgtctcgtttacaacaagaccgaacgcaagaacgtgagcgtcaacccaaccgaagagttgcagtgtgtttttgatgagttcggcatcaagtggaataccggcgaagacctgattgaatctattagcctgatcccggcggaaaagtccaacgcgaagttcttcgacgttttgttgcgtatgtttaacgcgactcttcagatgagaaacagcgtgccgaataccgacaccgactacttggtcagcccggtgaaagctgaagacggcagctttttcgacagccgcgaggagtttaagaaaggtggcgatgcccgcctgccgatagactgcgatgctaatggtgcgtaccatattgccctgaaaggcttgtacttgttgttgaatgatttcaaccgtgataacaagggcgtcatccaaaacatctctaacaaggactggtttaaattcgtgcaggagaaagtttacaaagactaa

SEQ ID NO: 154 - DNA, 3882 bp, synthetic construct
  source 1..3882: mol_type = other DNA
atggctaggataattgatgaattttgtggacagatgaatggatacagccgttccatcacgctgcgtaaccgcctggtgccgatcggcaagaccgaggaaaatctgaaacagtttctggagaaggacttagagcgcgcaactgcgtacccggacatcaaaaacctgattgacgctatccatcgtaatgtcattgaggacaccttaagcaaagtggccctgaactggaacgaaatctttaatatcctcgcgacgtaccagaacgaaaaagataaaaagaaaaaggcggcgatcaaaaaggacctggagaagctccaaagcggtgcacgtaaaaagattgttgaggcattcaaaaagaacccggattttgaaaaactgttcaaagagggtctgtttaaagagttgctgcctgaactgatcaaaagcgcaccggttgatgaaatcgcggttaaaaccaaggcgctggaatgcttcaaccgttttagcacctatttcacgggtttccacgacaatcgcaaaaacatgtactcggaagaagctaaatctaccgcaattagctatcgcatcgtgaacgaaaatttcccgaaattttttgccaatatcaagttgttcaactatctgaaagagcactttccgcgaatcatcattgataccgaagagtccctgaaagactatttgaagggcaaaaagctggattctgtatttagcattgacggctttaacagcgtgctggcgcagagcgggattgatttctataacaccgtgataggcggtatttcaggtgaggccggcaccaaaaaaacgcagggtcttaacgagaagattaacttagcgcgccagcaattatccaaggaggagaagaacaagctgcgcggtaaaatggtggtgctgtttaaacagatcttgtctgatcgtgaaaccagcagctttatcccagtgggttttgccaacaaggaggaggtgtactctacggtgaaagaattcaacaactcgattgccgaaaaggcggtgtccaaggtgcgtgatctattcctgcaccgcgaagaattcacgctaaacgagattttcgtcccggcaaagagcttgaccgacttcagtcaggccatcttcggatcctggtctattttgagtgagggcctgttcctgctggagaaggacagcatgaaaaaggctctaagcgaatcccaagaagaaaagatcaataaggagattgcgaaaaaagactgctcctttaccgaactacaactggcgtacgagcgctactgcaccgagcacaacttgccggttgaaaaattctgcaaagactacttcgacatcgtcgattacaggggaaacggtgcgaaaagcgaaaaaacaaaagtgagcatcctgagcgaaatcctggaaacctttttacaattggactttgaccacattcaggacctgcaacaagaaaagaacgctgcgattcctatcaaagcatatcttgacgaagttcagaatttgtaccaccacctgaagttggtcgattatcgtggcgaagagcagaaagactcaaccttttatagcaaacacgatgaaatcctgaccgatctttctcagatcgtcccattgtataataaagtccgtaactttgttaccaaaaaactgggtgagagcaaaaagatcaagctgaacttcgattgcccgactctggctaatggctgggatgagaatcaagagtccagcaacgatgcaattatcctgagaaaggacggcaaatactatctgggcatttacaacccgaacaacaaaccgaaattcgcgaagaaggacagcatcgtgggtgattgctatgaaaaaatggcatacaagcaaatcgcactgccgatgggtttgggtgcatttgtgcgcaaatgctttggcaccgctcagaaatacggttggggttgcccggagaattgcctgaacagcgagggtaaaattatcatcaaagacgaggaggcgaagggtaatctggaggcaatcatcgactgttacaaagattttctgaacaagtacgaaaaggacggcttcaagtacaaggactacaatttttccttcctggactctgccagctatgaaaaactgtctgatttcttcaacgacgttaaaccgcagggctataagctgagctttacgtccatcccactgtcagagatcgataagatgattgatgaaggtaaactgtttttgtttcagatatataacaaagacttcgcgaagaaggcgacggggaagaagaacctgcataccctttattgggaaaacctattctcagtcgagaatctgcaagatgtggtgttgaagctcaatggcgaagccgagctgttctggcgtgaggctagcatcaaaaaggacaaggtgatcgttcacaaaaaaggttctattctggtgaatcgtaccaccacggatggtaagagcatcccggaggccatttatcaagaaatctatcaattaaaaaacaaaatggcggattccatcagcgacgaagcgaaacgccttctagagtccggcaccgttgtctgtaaagtcgccactcatgatatcgttaaggataaacattttactgaaaacacgtatctgttccattgtccgattaccatgaacttcaaggcaaaagaccgtaccaataaggaatttaacaatcatgttctggaggttcttaacaagaatccggatattaaggtgatcggcttagaccgtggcgaacgtcatctgctgtacctgagcctgatcaatcagaagggtgaaattgagtgccagaaaacgctgaacctagttgagcaagttcgtaatgataagaccgtttccgttaattatcatgaaaaactggtgcacaaagaaggcagccgtgatgctgcgagaaaaaactggcagaccattggcaatattaaagagctgaaggagggctacctgtcggcggtggtgcacgagattgcgagtctgatggtaaagcacaatgcgatcgttgtaatggaagacctgaatttcggctttaagcgcggtcgttttgctgtggagcgtcagatctaccaaaagttcgaaaacatgctgattgagaagctgaactatctggtttttaaagaccgtaaagtgacggagccgggtggcgttctgaacgcgtaccagttggcgaacaagagcgcgaaggtgacagatgtttataaacaatgcggttggctgttctatatcccggcagcgtacaccagcaaaattgatccgcgtaccggtttcgcgaatctgttcattaccaagggtctgaccaatgttgagaagaagaaggagtttttcggcaagttcgactcgattcgttatgatgcgaccgagtcttgtttcgttttttccttcgactacgcaaagatttgtgacaatgctgattacaagaagaaatgggatgtttacacccgtggtactcgtctcgtttacaacaagaccgaacgcaagaacgtgagcgtcaacccaaccgaagagttgcagtgtgtttttgatgagttcggcatcaagtggaataccggcgaagacctgattgaatctattagcctgatcccggcggaaaagtccaacgcgaagttcttcgacgttttgttgcgtatgtttaacgcgactcttcagatgagaaacagcgtgccgaataccgacaccgactacttggtcagcccggtgaaagctgaagacggcagctttttcgacagccgcgaggagtttaagaaaggtggcgatgcccgcctgccgatagactgcgatgctagtggtgcgtaccatattgccctgaaaggcttgtacttgttgttgaatgatttcaaccgtgataacaagggcgtcatccaaaacatctctaacaaggactggtttaaattcgtgcaggagaaagtttacaaagactaa

SEQ ID NO: 155 - DNA, 3882 bp, synthetic construct
  source 1..3882: mol_type = other DNA
atggctaggataattgatgaattttgtggacagatgaatggatacagccgttccatcacgctgcgtaaccgcctggtgccgatcggcaagaccgaggaaaatctgaaacagtttctggagaaggacttagagcgcgcaactgcgtacccggacatcaaaaacctgattgacgctatccatcgtaatgtcattgaggacaccttaagcaaagtggccctgaactggaacgaaatctttaatatcctcgcgacgtaccagaacgaaaaagataaaaagaaaaaggcggcgatcaaaaaggacctggagaagctccaaagcggtgcacgtaaaaagattgttgaggcattcaaaaagaacccggattttgaaaaactgttcaaagagggtctgtttaaagagttgctgcctgaactgatcaaaagcgcaccggttgatgaaatcgcggttaaaaccaaggcgctggaatgcttcaaccgttttagcacctatttcacgggtttccacgacaatcgcaaaaacatgtactcggaagaagctaaatctaccgcaattagctatcgcatcgtgaacgaaaatttcccgaaattttttgccaatatcaagttgttcaactatctgaaagagcactttccgcgaatcatcattgataccgaagagtccctgaaagactatttgaagggcaaaaagctggattctgtatttagcattgacggctttaacagcgtgctggcgcagagcgggattgatttctataacaccgtgataggcggtatttcaggtgaggccggcaccaaaaaaacgcagggtcttaacgagaagattaacttagcgcgccagcaattatccaaggaggagaagaacaagctgcgcggtaaaatggtggtgctgtttaaacagatcttgtctgatcgtgaaaccagcagctttatcccagtgggttttgccaacaaggaggaggtgtactctacggtgaaagaattcaacaactcgattgccgaaaaggcggtgtccaaggtgcgtgatctattcctgcaccgcgaagaattcacgctaaacgagattttcgtcccggcaaagagcttgaccgacttcagtcaggccatcttcggatcctggtctattttgagtgagggcctgttcctgctggagaaggacagcatgaaaaaggctctaagcgaatcccaagaagaaaagatcaataaggagattgcgaaaaaagactgctcctttaccgaactacaactggcgtacgagcgctactgcaccgagcacaacttgccggttgaaaaattctgcaaagactacttcgacatcgtcgattacaggggaaacggtgcgaaaagcgaaaaaacaaaagtgagcatcctgagcgaaatcctggaaacctttttacaattggactttgaccacattcaggacctgcaacaagaaaagaacgctgcgattcctatcaaagcatatcttgacgaagttcagaatttgtaccaccacctgaagttggtcgattatcgtggcgaagagcagaaagactcaaccttttatagcaaacacgatgaaatcctgaccgatctttctcagatcgtcccattgtataataaagtccgtaactttgttaccaaaaaactgggtgagagcaaaaagatcaagctgaacttcgattgcccgactctggctaatggctgggatgagaatcaagagtccagcaacgatgcaattatcctgagaaaggacggcaaatactatctgggcatttacaacccgaacaacaaaccgaaattcgcgaagaaggacagcatcgtgggtgattgctatgaaaaaatggcatacaagcaaatcgcactgccgatgggtttgggtgcatttgtgcgcaaatgctttggcaccgctcagaaatacggttggggttgcccggagaattgcctgaacagcgagggtaaaattatcatcaaagacgaggaggcgaagggtaatctggaggcaatcatcgactgttacaaagattttctgaacaagtacgaaaaggacggcttcaagtacaaggactacaatttttccttcctggactctgccagctatgaaaaactgtctgatttcttcaacgacgttaaaccgcagggctataagctgagctttacgtccatcccactgtcagagatcgataagatgattgatgaaggtaaactgtttttgtttcagatatataacaaagacttcgcgaagaaggcgacggggaagaagaacctgcataccctttattgggaaaacctattctcagtcgagaatctgcaagatgtggtgttgaagctcaatggcgaagccgagctgttctggcgtgaggctagcatcaaaaaggacaaggtgatcgttcacaaaaaaggttctattctggtgaatcgtaccaccacggatggtaagagcatcccggaggccatttatcaagaaatctatcaattaaaaaacaaaatggcggattccatcagcgacgaagcgaaacgccttctagagtccggcaccgttgtctgtaaagtcgccactcatgatatcgttaaggataaacattttactgaaaacacgtatctgttccattgtccgattaccatgaacttcaaggcaaaagaccgtaccaataaggaatttaacaatcatgttctggaggttcttaacaagaatccggatattaaggtgatcggcttagaccgtggcgaacgtcatctgctgtacctgagcctgatcaatcagaagggtgaaattgagtgccagaaaacgctgaacctagttgagcaagttcgtaatgataagaccgtttccgttaattatcatgaaaaactggtgcacaaagaaggcagccgtgatgctgcgagaaaaaactggcagaccattggcaatattaaagagctgaaggagggctacctgtcggcggtggtgcacgagattgcgagtctgatggtaaagcacaatgcgatcgttgtaatggaagacctgaatttcggctttaagcgcggtcgttttgctgtggagcgtcagatctaccaaaagttcgaaaacatgctgattgagaagctgaactatctggtttttaaagaccgtaaagtgacggagccgggtggcgttctgaacgcgtaccagttggcgaacaagagcgcgaaggtgacagatgtttataaacaatgcggttggctgttctatatcccggcagcgtacaccagcaaaattgatccgcgtaccggtttcgcgaatctgttcattaccaagggtctgaccaatgttgagaagaagaaggagtttttcggcaagttcgactcgattcgttatgatgcgaccgagtcttgtttcgttttttccttcgactacgcaaagatttgtgacaatgctgattacaagaagaaatgggatgtttacacccgtggtactcgtctcgtttacaacaagaccgaacgcaagaacgtgagcgtcaacccaaccgaagagttgcagtgtgtttttgatgagttcggcatcaagtggaataccggcgaagacctgattgaatctattagcctgatcccggcggaaaagtccaacgcgaagttcttcgacgttttgttgcgtatgtttaacgcgactcttcagatgagaaacagcgtgccgaataccgacaccgactacttggtcagcccggtgaaagctgaagacggcagctttttcgacagccgcgaggagtttaagaaaggtggcgatgcccgcctgccgatagactgcgatgctaatggtgtgtaccatattgccctgaaaggcttgtacttgttgttgaatgatttcaaccgtgataacaagggcgtcatccaaaacatctctaacaaggactggtttaaattcgtgcaggagaaagtttacaaagactaa

SEQ ID NO: 156 - DNA, 3882 bp, synthetic construct
  source 1..3882: mol_type = other DNA
atggctaggataattgatgaattttgtggacagatgaatggatacagccgttccatcacgctgcgtaaccgcctggtgccgatcggcaagaccgaggaaaatctgaaacagtttctggagaaggacttagagcgcgcaactgcgtacccggacatcaaaaacctgattgacgctatccatcgtaatgtcattgaggacaccttaagcaaagtggccctgaactggaacgaaatctttaatatcctcgcgacgtaccagaacgaaaaagataaaaagaaaaaggcggcgatcaaaaaggacctggagaagctccaaagcggtgcacgtaaaaagattgttgaggcattcaaaaagaacccggattttgaaaaactgttcaaagagggtctgtttaaagagttgctgcctgaactgatcaaaagcgcaccggttgatgaaatcgcggttaaaaccaaggcgctggaatgcttcaaccgttttagcacctatttcacgggtttccacgacaatcgcaaaaacatgtactcggaagaagctaaatctaccgcaattagctatcgcatcgtgaacgaaaatttcccgaaattttttgccaatatcaagttgttcaactatctgaaagagcactttccgcgaatcatcattgataccgaagagtccctgaaagactatttgaagggcaaaaagctggattctgtatttagcattgacggctttaacagcgtgctggcgcagagcgggattgatttctataacaccgtgataggcggtatttcaggtgaggccggcaccaaaaaaacgcagggtcttaacgagaagattaacttagcgcgccagcaattatccaaggaggagaagaacaagctgcgcggtaaaatggtggtgctgtttaaacagatcttgtctgatcgtgaaaccagcagctttatcccagtgggttttgccaacaaggaggaggtgtactctacggtgaaagaattcaacaactcgattgccgaaaaggcggtgtccaaggtgcgtgatctattcctgcaccgcgaagaattcacgctaaacgagattttcgtcccggcaaagagcttgaccgacttcagtcaggccatcttcggatcctggtctattttgagtgagggcctgttcctgctggagaaggacagcatgaaaaaggctctaagcgaatcccaagaagaaaagatcaataaggagattgcgaaaaaagactgctcctttaccgaactacaactggcgtacgagcgctactgcaccgagcacaacttgccggttgaaaaattctgcaaagactacttcgacatcgtcgattacaggggaaacggtgcgaaaagcgaaaaaacaaaagtgagcatcctgagcgaaatcctggaaacctttttacaattggactttgaccacattcaggacctgcaacaagaaaagaacgctgcgattcctatcaaagcatatcttgacgaagttcagaatttgtaccaccacctgaagttggtcgattatcgtggcgaagagcagaaagactcaaccttttatagcaaacacgatgaaatcctgaccgatctttctcagatcgtcccattgtataataaagtccgtaactttgttaccaaaaaactgggtgagagcaaaaagatcaagctgaacttcgattgcccgactctggctaatggctgggatgagaatcaagagtccagcaacgatgcaattatcctgagaaaggacggcaaatactatctgggcatttacaacccgaacaacaaaccgaaattcgcgaagaaggacagcatcgtgggtgattgctatgaaaaaatggcatacaagcaaatcgcactgccgatgggtttgggtgcatttgtgcgcaaatgctttggcaccgctcagaaatacggttggggttgcccggagaattgcctgaacagcgagggtaaaattatcatcaaagacgaggaggcgaagggtaatctggaggcaatcatcgactgttacaaagattttctgaacaagtacgaaaaggacggcttcaagtacaaggactacaatttttccttcctggactctgccagctatgaaaaactgtctgatttcttcaacgacgttaaaccgcagggctataagctgagctttacgtccatcccactgtcagagatcgataagatgattgatgaaggtaaactgtttttgtttcagatatataacaaagacttcgcgaagaaggcgacggggaagaagaacctgcataccctttattgggaaaacctattctcagtcgagaatctgcaagatgtggtgttgaagctcaatggcgaagccgagctgttctggcgtgaggctagcatcaaaaaggacaaggtgatcgttcacaaaaaaggttctattctggtgaatcgtaccaccacggatggtaagagcatcccggaggccatttatcaagaaatctatcaattaaaaaacaaaatggcggattccatcagcgacgaagcgaaacgccttctagagtccggcaccgttgtctgtaaagtcgccactcatgatatcgttaaggataaacattttactgaaaacacgtatctgttccattgtccgattaccatgaacttcaaggcaaaagaccgtaccaataaggaatttaacaatcatgttctggaggttcttaacaagaatccggatattaaggtgatcggcttagaccgtggcgaacgtcatctgctgtacctgagcctgatcaatcagaagggtgaaattgagtgccagaaaacgctgaacctagttgagcaagttcgtaatgataagaccgtttccgttaattatcatgaaaaactggtgcacaaagaaggcagccgtgatgctgcgagaaaaaactggcagaccattggcaatattaaagagctgaaggagggctacctgtcggcggtggtgcacgagattgcgagtctgatggtaaagcacaatgcgatcgttgtaatggaagacctgaatttcggctttaagcgcggtcgttttgctgtggagcgtcagatctaccaaaagttcgaaaacatgctgattgagaagctgaactatctggtttttaaagaccgtaaagtgacggagccgggtggcgttctgaacgcgtaccagttggcgaacaagagcgcgaaggtgacagatgtttataaacaatgcggttggctgttctatatcccggcagcgtacaccagcaaaattgatccgcgtaccggtttcgcgaatctgttcattaccaagggtctgaccaatgttgagaagaagaaggagtttttcggcaagttcgactcgattcgttatgatgcgaccgagtcttgtttcgttttttccttcgactacgcaaagatttgtgacaatgctgattacaagaagaaatgggatgtttacacccgtggtactcgtctcgtttacaacaagaccgaacgcaagaacgtgagcgtcaacccaaccgaagagttgcagtgtgtttttgatgagttcggcatcaagtggaataccggcgaagacctgattgaatctattagcctgatcccggcggaaaagtccaacgcgaagttcttcgacgttttgttgcgtatgtttaacgcgactcttcagatgagaaacagcgtgccgaataccgacaccgactacttggtcagcccggtgaaagctgaagacggcagctttttcgacagccgcgaggagtttaagaaaggtggcgatgcccgcctgccgatagactgcgatgctaatggtgcgtaccatattgccctgaaaggcttgtacttgttgttgattgatttcaaccgtgataacaagggcgtcatccaaaacatctctaacaaggactggtttaaattcgtgcaggagaaagtttacaaagactaa

SEQ ID NO: 157 - DNA, 3882 bp, synthetic construct
  source 1..3882: mol_type = other DNA
atggctaggataattgatgaattttgtggacagatgaatggatacagccgttccatcacgctgcgtaaccgcctggtgccgatcggcaagaccgaggaaaatctgaaacagtttctggagaaggacttagagcgcgcaactgcgtacccggacatcaaaaacctgattgacgctatccatcgtaatgtcattgaggacaccttaagcaaagtggccctgaactggaacgaaatctttaatatcctcgcgacgtaccagaacgaaaaagataaaaagaaaaaggcggcgatcaaaaaggacctggagaagctccaaagcggtgcacgtaaaaagattgttgaggcattcaaaaagaacccggattttgaaaaactgttcaaagagggtctgtttaaagagttgctgcctgaactgatcaaaagcgcaccggttgatgaaatcgcggttaaaaccaaggcgctggaatgcttcaaccgttttagcacctatttcacgggtttccacgacaatcgcaaaaacatgtactcggaagaagctaaatctaccgcaattagctatcgcatcgtgaacgaaaatttcccgaaattttttgccaatatcaagttgttcaactatctgaaagagcactttccgcgaatcatcattgataccgaagagtccctgaaagactatttgaagggcaaaaagctggattctgtatttagcattgacggctttaacagcgtgctggcgcagagcgggattgatttctataacaccgtgataggcggtatttcaggtgaggccggcaccaaaaaaacgcagggtcttaacgagaagattaacttagcgcgccagcaattatccaaggaggagaagaacaagctgcgcggtaaaatggtggtgctgtttaaacagatcttgtctgatcgtgaaaccagcagctttatcccagtgggttttgccaacaaggaggaggtgtactctacggtgaaagaattcaacaactcgattgccgaaaaggcggtgtccaaggtgcgtgatctattcctgcaccgcgaagaattcacgctaaacgagattttcgtcccggcaaagagcttgaccgacttcagtcaggccatcttcggatcctggtctattttgagtgagggcctgttcctgctggagaaggacagcatgaaaaaggctctaagcgaatcccaagaagaaaagatcaataaggagattgcgaaaaaagactgctcctttaccgaactacaactggcgtacgagcgctactgcaccgagcacaacttgccggttgaaaaattctgcaaagactacttcgacatcgtcgattacaggggaaacggtgcgaaaagcgaaaaaacaaaagtgagcatcctgagcgaaatcctggaaacctttttacaattggactttgaccacattcaggacctgcaacaagaaaagaacgctgcgattcctatcaaagcatatcttgacgaagttcagaatttgtaccaccacctgaagttggtcgattatcgtggcgaagagcagaaagactcaaccttttatagcaaacacgatgaaatcctgaccgatctttctcagatcgtcccattgtataataaagtccgtaactttgttaccaaaaaactgggtgagagcaaaaagatcaagctgaacttcgattgcccgactctggctaatggctgggatgagaatcaagagtccagcaacgatgcaattatcctgagaaaggacggcaaatactatctgggcatttacaacccgaacaacaaaccgaaattcgcgaagaaggacagcatcgtgggtgattgctatgaaaaaatggcatacaagcaaatcgcactgccgatgggtttgggtgcatttgtgcgcaaatgctttggcaccgctcagaaatacggttggggttgcccggagaattgcctgaacagcgagggtaaaattatcatcaaagacgaggaggcgaagggtaatctggaggcaatcatcgactgttacaaagattttctgaacaagtacgaaaaggacggcttcaagtacaaggactacaatttttccttcctggactctgccagctatgaaaaactgtctgatttcttcaacgacgttaaaccgcagggctataagctgagctttacgtccatcccactgtcagagatcgataagatgattgatgaaggtaaactgtttttgtttcagatatataacaaagacttcgcgaagaaggcgacggggaagaagaacctgcataccctttattgggaaaacctattctcagtcgagaatctgcaagatgtggtgttgaagctcaatggcgaagccgagctgttctggcgtgaggctagcatcaaaaaggacaaggtgatcgttcacaaaaaaggttctattctggtgaatcgtaccaccacggatggtaagagcatcccggaggccatttatcaagaaatctatcaattaaaaaacaaaatggcggattccatcagcgacgaagcgaaacgccttctagagtccggcaccgttgtctgtaaagtcgccactcatgatatcgttaaggataaacattttactgaaaacacgtatctgttccattgtccgattaccatgaacttcaaggcaaaagaccgtaccaataaggaatttaacaatcatgttctggaggttcttaacaagaatccggatattaaggtgatcggcttagaccgtggcgaacgtcatctgctgtacctgagcctgatcaatcagaagggtgaaattgagtgccagaaaacgctgaacctagttgagcaagttcgtaatgataagaccgtttccgttaattatcatgaaaaactggtgcacaaagaaggcagccgtgatgctgcgagaaaaaactggcagaccattggcaatattaaagagctgaaggagggctacctgtcggcggtggtgcacgagattgcgagtctgatggtaaagcacaatgcgatcgttgtaatggaagacctgaatttcggctttaagcgcggtcgttttgctgtggagcgtcagatctaccaaaagttcgaaaacatgctgattgagaagctgaactatctggtttttaaagaccgtaaagtgacggagccgggtggcgttctgaacgcgtaccagttggcgaacaagagcgcgaaggtgacagatgtttataaacaatgcggttggctgttctatatcccggcagcgtacaccagcaaaattgatccgcgtaccggtttcgcgaatctgttcattaccaagggtctgaccaatgttgagaagaagaaggagtttttcggcaagttcgactcgattcgttatgatgcgaccgagtcttgtttcgttttttccttcgactacgcaaagatttgtgacaatgctgattacaagaagaaatgggatgtttacacccgtggtactagtctcgtttacaacaagaccgaacgcaagaacgtgagcgtcaacccaaccgaagagttgcagtgtgtttttgatgagttcggcatcaagtggaataccggcgaagacctgattgaatctattagcctgatcccggcggaaaagtccaacgcgaagttcttcgacgttttgttgcgtatgtttaacgcgactcttcagatgagaaacagcgtgccgaataccgacaccgactacttggtcagcccggtgaaagctgaagacggcagctttttcgacagccgcgaggagtttaagaaaggtggcgatgcccgcctgccgatagactgcgatgctaatggtgcgtaccatattgccctgaaaggcttgtacttgttgttgaatgatttcaaccgtgataacaagggcgtcatccaaaacatctctaacaaggactggtttaaattcgtgcaggagaaagtttacaaagactaa

SEQ ID NO: 158 - DNA, 19 bp, synthetic construct
  source 1..19: mol_type = other DNA
ggatctcgacgctctccct

SEQ ID NO: 159 - DNA, 20 bp, synthetic construct
  source 1..20: mol_type = other DNA
tcccattcgccatgccgaag

SEQ ID NO: 160 - DNA, 29 bp, synthetic construct
  source 1..29: mol_type = other DNA
cttggccttgtcaaggctattggtcaaga

SEQ ID NO: 161 - DNA, 37 bp, synthetic construct
  source 1..37: mol_type = other DNA
agcttcttgaccaatagccttgacaaggccaaggtac

SEQ ID NO: 162 - DNA, 51 bp, synthetic construct
  source 1..51: mol_type = other DNA
ctagtgtaatttctactaagtgtagataccatcagaggacacttggattcg

SEQ ID NO: 163 - DNA, 51 bp, synthetic construct
  source 1..51: mol_type = other DNA
cggccgaatccaagtgtcctctgatggtatctacacttagtagaaattaca

SEQ ID NO: 164 - DNA, 48 bp, synthetic construct
  source 1..48: mol_type = other DNA
atctacacttagtagaaattacactagctagtgtttaacgctggtctg

SEQ ID NO: 165 - DNA, 41 bp, synthetic construct
  source 1..41: mol_type = other DNA
gggtcttgaggggttttttggtaccttgacagctagctcag

SEQ ID NO: 166 - DNA, 51 bp, synthetic construct
  source 1..51: mol_type = other DNA
ctagtgtaatttctactaagtgtagatccttgtcaaggctattggtcaagg

SEQ ID NO: 167 - DNA, 20 bp, synthetic construct
  source 1..20: mol_type = other DNA
caaaaaacccctcaagaccc

SEQ ID NO: 168 - DNA, 54 bp, synthetic construct
  source 1..54: mol_type = other DNA
atctacaacagtagaaattcacactagctcgagttagtctttgtaaactttctc

SEQ ID NO: 169 - DNA, 51 bp, synthetic construct
  source 1..51: mol_type = other DNA
ctagtgtgaatttctactgttgtagataccatcagaggacacttggattcg

SEQ ID NO: 170 - DNA, 51 bp, synthetic construct
  source 1..51: mol_type = other DNA
cggccgaatccaagtgtcctctgatggtatctacaacagtagaaattcaca

SEQ ID NO: 171 - DNA, 51 bp, synthetic construct
  source 1..51: mol_type = other DNA
ctagtgtgaatttctactgttgtagatccttgtcaaggctattggtcaagg

SEQ ID NO: 172 - DNA, 32 bp, synthetic construct
  source 1..32: mol_type = other DNA
atggtctcccatggctaggataattgatgaat

SEQ ID NO: 173 - DNA, 26 bp, synthetic construct
  source 1..26: mol_type = other DNA
atggtctcggatccgaagatggcctg

SEQ ID NO: 174 - DNA, 42 bp, synthetic construct
  source 1..42: mol_type = other DNA
cgtctcgcatggtctcgatatcatgagtggcgactttacaga

SEQ ID NO: 175 - DNA, 49 bp, synthetic construct
  source 1..49: mol_type = other DNA
cgtctcgcatggtctcctcgagctagtgtgaatttctactgttgtagat

SEQ ID NO: 176 - DNA, 38 bp, synthetic construct
  source 1..38: mol_type = other DNA
cgtctcgcatggtctctgaagtcggtcaagctctttgc

SEQ ID NO: 177 - DNA, 36 bp, synthetic construct
  source 1..36: mol_type = other DNA
cgtctcgcatggtctctcgcactgccgatgggtttg

SEQ ID NO: 178 - DNA, 45 bp, synthetic construct
  source 1..45: mol_type = other DNA
cgtctcgcatggtctcgttgaagaaatcagacagtttttcatagc

SEQ ID NO: 179 - DNA, 44 bp, synthetic construct
  source 1..44: mol_type = other DNA
cgtctcgcatggtctcgtatctgttccattgtccgattaccatg

SEQ ID NO: 180 - DNA, 41 bp, synthetic construct
  source 1..41: mol_type = other DNA
atggtctcgatatcgttaaggataaacattttactgaaaac

SEQ ID NO: 181 - DNA, 35 bp, synthetic construct
  source 1..35: mol_type = other DNA
atggtctcctcgagttagtctttgtaaactttctc

SEQ ID NO: 182 - DNA, 38 bp, synthetic construct
  source 1..38: mol_type = other DNA
attaggtctcgtgcgatttgcttgtatgccattttttc

SEQ ID NO: 183 - DNA, 36 bp, synthetic construct
  source 1..36: mol_type = other DNA
attaggtctcacttcagtcaggccatcttcggatcc

SEQ ID NO: 184 - DNA, 33 bp, synthetic construct
  source 1..33: mol_type = other DNA
attaggtctcttcaacgacgttaaaccgcaggg

SEQ ID NO: 185 - DNA, 51 bp, synthetic construct
  source 1..51: mol_type = other DNA
attaggtctcagatacgtgttttcagtaaaatgtttatccttaacgatatc

SEQ ID NO: 186 - DNA, 44 bp, synthetic construct
  source 1..44: mol_type = other DNA
gtagaaataattttgtttaactttaataaggagatataccatgg

SEQ ID NO: 187 - DNA, 25 bp, synthetic construct
  source 1..25: mol_type = other DNA
cctcactcaaaatagaccaggatcc

SEQ ID NO: 188 - DNA, 26 bp, synthetic construct
  source 1..26: mol_type = other DNA
tctgtaaagtcgccactcatgatatc

SEQ ID NO: 189 - DNA, 33 bp, synthetic construct
  source 1..33: mol_type = other DNA
atctacaacagtagaaattcacactagctcgag

SEQ ID NO: 190 - DNA, 29 bp, synthetic construct
  source 1..29: mol_type = other DNA
ctcttccttgtcaaggctattggtcaaga

SEQ ID NO: 191 - DNA, 37 bp, synthetic construct
  source 1..37: mol_type = other DNA
agcttcttgaccaatagccttgacaaggaagaggtac

SEQ ID NO: 192 - RNA, 21 nt, synthetic construct
  source 1..21: mol_type = other RNA
tgaatttctactgttgtagat

SEQ ID NO: 193 - RNA, 44 nt, synthetic construct
  source 1..44: mol_type = other RNA
  modified_base 1: mod_base = OTHER; note = 2'-O-methyl modified nucleotide with phosphorothioate linkage
  modified_base 2: mod_base = OTHER; note = 2'-O-methyl modified nucleotide with phosphorothioate linkage
  modified_base 3: mod_base = OTHER; note = 2'-O-methyl modified nucleotide
  modified_base 4: mod_base = OTHER; note = 2'-O-methyl modified nucleotide
  modified_base 5: mod_base = OTHER; note = 2'-O-methyl modified nucleotide
  modified_base 6: mod_base = OTHER; note = 2'-O-methyl modified nucleotide
  modified_base 7: mod_base = OTHER; note = 2'-O-methyl modified nucleotide
  modified_base 8: mod_base = OTHER; note = 2'-O-methyl modified nucleotide
  modified_base 9: mod_base = OTHER; note = 2'-O-methyl modified nucleotide
  modified_base 10: mod_base = OTHER; note = 2'-O-methyl modified nucleotide
  modified_base 11: mod_base = OTHER; note = 2'-O-methyl modified nucleotide
  modified_base 12: mod_base = OTHER; note = 2'-O-methyl modified nucleotide
  modified_base 13: mod_base = OTHER; note = 2'-O-methyl modified nucleotide
  modified_base 14: mod_base = OTHER; note = 2'-O-methyl modified nucleotide
  modified_base 15: mod_base = OTHER; note = 2'-O-methyl modified nucleotide
  modified_base 16: mod_base = OTHER; note = 2'-O-methyl modified nucleotide
  modified_base 17: mod_base = OTHER; note = 2'-O-methyl modified nucleotide
  modified_base 18: mod_base = OTHER; note = 2'-O-methyl modified nucleotide
  modified_base 19: mod_base = OTHER; note = 2'-O-methyl modified nucleotide
  modified_base 20: mod_base = OTHER; note = 2'-O-methyl modified nucleotide
  modified_base 21: mod_base = OTHER; note = 2'-O-methyl modified nucleotide
  modified_base 22: mod_base = OTHER; note = 2'-O-methyl modified nucleotide
  modified_base 23: mod_base = OTHER; note = 2'-O-methyl modified nucleotide
  modified_base 24: mod_base = OTHER; note = 2'-O-methyl modified nucleotide
  modified_base 25: mod_base = OTHER; note = 2'-O-methyl modified nucleotide
  modified_base 26: mod_base = OTHER; note = 2'-O-methyl modified nucleotide
  modified_base 27: mod_base = OTHER; note = 2'-O-methyl modified nucleotide
  modified_base 28: mod_base = OTHER; note = 2'-O-methyl modified nucleotide
  modified_base 29: mod_base = OTHER; note = 2'-O-methyl modified nucleotide
  modified_base 30: mod_base = OTHER; note = 2'-O-methyl modified nucleotide
  modified_base 31: mod_base = OTHER; note = 2'-O-methyl modified nucleotide
  modified_base 32: mod_base = OTHER; note = 2'-O-methyl modified nucleotide
  modified_base 33: mod_base = OTHER; note = 2'-O-methyl modified nucleotide
  modified_base 34: mod_base = OTHER; note = 2'-O-methyl modified nucleotide
  modified_base 35: mod_base = OTHER; note = 2'-O-methyl modified nucleotide
  modified_base 36: mod_base = OTHER; note = 2'-O-methyl modified nucleotide
  modified_base 37: mod_base = OTHER; note = 2'-O-methyl modified nucleotide
  modified_base 38: mod_base = OTHER; note = 2'-O-methyl modified nucleotide
  modified_base 39: mod_base = OTHER; note = 2'-O-methyl modified nucleotide
  modified_base 40: mod_base = OTHER; note = 2'-O-methyl modified nucleotide
  modified_base 41: mod_base = OTHER; note = 2'-O-methyl modified nucleotide
  modified_base 42: mod_base = OTHER; note = 2'-O-methyl modified nucleotide with phosphorothioate linkage
  modified_base 43: mod_base = OTHER; note = 2'-O-methyl modified nucleotide with phosphorothioate linkage
  modified_base 44: mod_base = OTHER; note = 2'-O-methyl modified nucleotide
tgaatttctactgttgtagattcttcgcccagagcatcccatgg

SEQ ID NO: 194 - RNA, 44 nt, synthetic construct; identical to SEQ ID NO: 193
  source 1..44: mol_type = other RNA
  modified_base 1: mod_base = OTHER; note = 2'-O-methyl modified nucleotide with phosphorothioate linkage
  modified_base 2: mod_base = OTHER; note = 2'-O-methyl modified nucleotide with phosphorothioate linkage
  modified_base 3: mod_base = OTHER; note = 2'-O-methyl modified nucleotide
  modified_base 4: mod_base = OTHER; note = 2'-O-methyl modified nucleotide
  modified_base 5: mod_base = OTHER; note = 2'-O-methyl modified nucleotide
  modified_base 6: mod_base = OTHER; note = 2'-O-methyl modified nucleotide
  modified_base 7: mod_base = OTHER; note = 2'-O-methyl modified nucleotide
  modified_base 8: mod_base = OTHER; note = 2'-O-methyl modified nucleotide
  modified_base 9: mod_base = OTHER; note = 2'-O-methyl modified nucleotide
  modified_base 10: mod_base = OTHER; note = 2'-O-methyl modified nucleotide
  modified_base 11: mod_base = OTHER; note = 2'-O-methyl modified nucleotide
  modified_base 12: mod_base = OTHER; note = 2'-O-methyl modified nucleotide
  modified_base 13: mod_base = OTHER; note = 2'-O-methyl modified nucleotide
  modified_base 14: mod_base = OTHER; note = 2'-O-methyl modified nucleotide
  modified_base 15: mod_base = OTHER; note = 2'-O-methyl modified nucleotide
  modified_base 16: mod_base = OTHER; note = 2'-O-methyl modified nucleotide
  modified_base 17: mod_base = OTHER; note = 2'-O-methyl modified nucleotide
  modified_base 18: mod_base = OTHER; note = 2'-O-methyl modified nucleotide
  modified_base 19: mod_base = OTHER; note = 2'-O-methyl modified nucleotide
  modified_base 20: mod_base = OTHER; note = 2'-O-methyl modified nucleotide
  modified_base 21: mod_base = OTHER; note = 2'-O-methyl modified nucleotide
  modified_base 22: mod_base = OTHER; note = 2'-O-methyl modified nucleotide
  modified_base 23: mod_base = OTHER; note = 2'-O-methyl modified nucleotide
  modified_base 24: mod_base = OTHER; note = 2'-O-methyl modified nucleotide
  modified_base 28: mod_base = OTHER; note = 2'-O-methyl modified nucleotide
  modified_base 29: mod_base = OTHER; note = 2'-O-methyl modified nucleotide
  modified_base 30: mod_base = OTHER; note = 2'-O-methyl modified nucleotide
  modified_base 31: mod_base = OTHER; note = 2'-O-methyl modified nucleotide
  modified_base 32: mod_base = OTHER; note = 2'-O-methyl modified nucleotide
  modified_base 33: mod_base = OTHER; note = 2'-O-methyl modified nucleotide
  modified_base 35: mod_base = OTHER; note = 2'-O-methyl modified nucleotide
  modified_base 36: mod_base = OTHER; note = 2'-O-methyl modified nucleotide
  modified_base 38: mod_base = OTHER; note = 2'-O-methyl modified nucleotide
  modified_base 39: mod_base = OTHER; note = 2'-O-methyl modified nucleotide
  modified_base 40: mod_base = OTHER; note = 2'-O-methyl modified nucleotide
  modified_base 41: mod_base = OTHER; note = 2'-O-methyl modified nucleotide
  modified_base 42: mod_base = OTHER; note = 2'-O-methyl modified nucleotide with phosphorothioate linkage
  modified_base 43: mod_base = OTHER; note = 2'-O-methyl modified nucleotide with phosphorothioate linkage
  modified_base 44: mod_base = OTHER; note = 2'-O-methyl modified nucleotide

SEQ ID NO: 195 - RNA, 44 nt, synthetic construct; identical to SEQ ID NO: 193
  source 1..44: mol_type = other RNA
  modified_base 1: mod_base = OTHER; note = 2'-O-methyl modified nucleotide with phosphorothioate linkage
  modified_base 2: mod_base = OTHER; note = 2'-O-methyl modified nucleotide with phosphorothioate linkage
  modified_base 6: mod_base = OTHER; note = 2'-O-methyl modified nucleotide
  modified_base 7: mod_base = OTHER; note = 2'-O-methyl modified nucleotide
  modified_base 8: mod_base = OTHER; note = 2'-O-methyl modified nucleotide
  modified_base 9: mod_base = OTHER; note = 2'-O-methyl modified nucleotide
  modified_base 10: mod_base = OTHER; note = 2'-O-methyl modified nucleotide
  modified_base 11: mod_base = OTHER; note = 2'-O-methyl modified nucleotide
  modified_base 13: mod_base = OTHER; note = 2'-O-methyl modified nucleotide
  modified_base 14: mod_base = OTHER; note = 2'-O-methyl modified nucleotide
  modified_base 15: mod_base = OTHER; note = 2'-O-methyl modified nucleotide
  modified_base 17: mod_base = OTHER; note = 2'-O-methyl modified nucleotide
  modified_base 18: mod_base = OTHER; note = 2'-O-methyl modified nucleotide
  modified_base 19: mod_base = OTHER; note = 2'-O-methyl modified nucleotide
  modified_base 20: mod_base = OTHER; note = 2'-O-methyl modified nucleotide
  modified_base 22: mod_base = OTHER; note = 2'-O-methyl modified nucleotide
  modified_base 23: mod_base = OTHER; note = 2'-O-methyl modified nucleotide
  modified_base 24: mod_base = OTHER; note = 2'-O-methyl modified nucleotide
  modified_base 25: mod_base = OTHER; note = 2'-O-methyl modified nucleotide
  modified_base 26: mod_base = OTHER; note = 2'-O-methyl modified nucleotide
  modified_base 27: mod_base = OTHER; note = 2'-O-methyl modified nucleotide
  modified_base 28: mod_base = OTHER; note = 2'-O-methyl modified nucleotide
  modified_base 29: mod_base = OTHER; note = 2'-O-methyl modified nucleotide
  modified_base 30: mod_base = OTHER; note = 2'-O-methyl modified nucleotide
  modified_base 31: mod_base = OTHER; note = 2'-O-methyl modified nucleotide
  modified_base 32: mod_base = OTHER; note = 2'-O-methyl modified nucleotide
  modified_base 33: mod_base = OTHER; note = 2'-O-methyl modified nucleotide
  modified_base 34: mod_base = OTHER; note = 2'-O-methyl modified nucleotide
  modified_base 35: mod_base = OTHER; note = 2'-O-methyl modified nucleotide
  modified_base 36: mod_base = OTHER; note = 2'-O-methyl modified nucleotide
  modified_base 37: mod_base = OTHER; note = 2'-O-methyl modified nucleotide
  modified_base 38: mod_base = OTHER; note = 2'-O-methyl modified nucleotide
  modified_base 39: mod_base = OTHER; note = 2'-O-methyl modified nucleotide
  modified_base 40: mod_base = OTHER; note = 2'-O-methyl modified nucleotide
  modified_base 41: mod_base = OTHER; note = 2'-O-methyl modified nucleotide
  modified_base 42: mod_base = OTHER; note = 2'-O-methyl modified nucleotide with phosphorothioate linkage
  modified_base 43: mod_base = OTHER; note = 2'-O-methyl modified nucleotide with phosphorothioate linkage
  modified_base 44: mod_base = OTHER; note = 2'-O-methyl modified nucleotide

SEQ ID NO: 196 - RNA, 44 nt, synthetic construct; identical to SEQ ID NO: 193
  source 1..44: mol_type = other RNA
  modified_base 1: mod_base = OTHER; note = 2'-O-methyl modified nucleotide with phosphorothioate linkage
  modified_base 2: mod_base = OTHER; note = 2'-O-methyl modified nucleotide with phosphorothioate linkage
  modified_base 6: mod_base = OTHER; note = 2'-O-methyl modified nucleotide
  modified_base 7: mod_base = OTHER; note = 2'-O-methyl modified nucleotide
  modified_base 8: mod_base = OTHER; note = 2'-O-methyl modified nucleotide
  modified_base 9: mod_base = OTHER; note = 2'-O-methyl modified nucleotide
  modified_base 10: mod_base = OTHER; note = 2'-O-methyl modified nucleotide
  modified_base 11: mod_base = OTHER; note = 2'-O-methyl modified nucleotide
  modified_base 13: mod_base = OTHER; note = 2'-O-methyl modified nucleotide
  modified_base 14: mod_base = OTHER; note = 2'-O-methyl modified nucleotide
  modified_base 15: mod_base = OTHER; note = 2'-O-methyl modified nucleotide
  modified_base 17: mod_base = OTHER; note = 2'-O-methyl modified nucleotide
  modified_base 18: mod_base = OTHER; note = 2'-O-methyl modified nucleotide
  modified_base 19: mod_base = OTHER; note = 2'-O-methyl modified nucleotide
  modified_base 20: mod_base = OTHER; note = 2'-O-methyl modified nucleotide
  modified_base 22: mod_base = OTHER; note = 2'-O-methyl modified nucleotide
  modified_base 23: mod_base = OTHER; note = 2'-O-methyl modified nucleotide
  modified_base 24: mod_base = OTHER; note = 2'-O-methyl modified nucleotide
  modified_base 28: mod_base = OTHER; note = 2'-O-methyl modified nucleotide
  modified_base 29: mod_base = OTHER; note = 2'-O-methyl modified nucleotide
  modified_base 30: mod_base = OTHER; note = 2'-O-methyl modified nucleotide
  modified_base 31: mod_base = OTHER; note = 2'-O-methyl modified nucleotide
  modified_base 32: mod_base = OTHER; note = 2'-O-methyl modified nucleotide
  modified_base 33: mod_base = OTHER; note = 2'-O-methyl modified nucleotide
  modified_base 35: mod_base = OTHER; note = 2'-O-methyl modified nucleotide
  modified_base 36: mod_base = OTHER; note = 2'-O-methyl modified nucleotide
  modified_base 38: mod_base = OTHER; note = 2'-O-methyl modified nucleotide
  modified_base 39: mod_base = OTHER; note = 2'-O-methyl modified nucleotide
  modified_base 40: mod_base = OTHER; note = 2'-O-methyl modified nucleotide
  modified_base 41: mod_base = OTHER; note = 2'-O-methyl modified nucleotide
  modified_base 42: mod_base = OTHER; note = 2'-O-methyl modified nucleotide with phosphorothioate linkage
  modified_base 43: mod_base = OTHER; note = 2'-O-methyl modified nucleotide with phosphorothioate linkage
  modified_base 44: mod_base = OTHER; note = 2'-O-methyl modified nucleotide

SEQ ID NO: 197 - RNA, 44 nt, synthetic construct; identical to SEQ ID NO: 193
  source 1..44: mol_type = other RNA
  modified_base 1: mod_base = OTHER; note = 2'-O-methyl modified nucleotide with phosphorothioate linkage
  modified_base 2: mod_base = OTHER; note = 2'-O-methyl modified nucleotide with phosphorothioate linkage
  modified_base 6: mod_base = OTHER; note = 2'-O-methyl modified nucleotide
  modified_base 7: mod_base = OTHER; note = 2'-O-methyl modified nucleotide
  modified_base 10: mod_base = OTHER; note = 2'-O-methyl modified nucleotide
  modified_base 11: mod_base = OTHER; note = 2'-O-methyl modified nucleotide
  modified_base 13: mod_base = OTHER; note = 2'-O-methyl modified nucleotide
  modified_base 14: mod_base = OTHER; note = 2'-O-methyl modified nucleotide
  modified_base 15: mod_base = OTHER; note = 2'-O-methyl modified nucleotide
  modified_base 17: mod_base = OTHER; note = 2'-O-methyl modified nucleotide
  modified_base 18: mod_base = OTHER; note = 2'-O-methyl modified nucleotide
  modified_base 19: mod_base = OTHER; note = 2'-O-methyl modified nucleotide
  modified_base 20: mod_base = OTHER; note = 2'-O-methyl modified nucleotide
  modified_base 22: mod_base = OTHER; note = 2'-O-methyl modified nucleotide
  modified_base 23: mod_base = OTHER; note = 2'-O-methyl modified nucleotide
  modified_base 24: mod_base = OTHER; note = 2'-O-methyl modified nucleotide
  modified_base 29: mod_base = OTHER; note = 2'-O-methyl modified nucleotide
  modified_base 30: mod_base = OTHER; note = 2'-O-methyl modified nucleotide
  modified_base 31: mod_base = OTHER; note = 2'-O-methyl modified nucleotide
  modified_base 33: mod_base = OTHER; note = 2'-O-methyl modified nucleotide
  modified_base 35: mod_base = OTHER; note = 2'-O-methyl modified nucleotide
  modified_base 36: mod_base = OTHER; note = 2'-O-methyl modified nucleotide
  modified_base 40: mod_base = OTHER; note = 2'-O-methyl modified nucleotide
  modified_base 41: mod_base = OTHER; note = 2'-O-methyl modified nucleotide
  modified_base 42: mod_base = OTHER; note = 2'-O-methyl modified nucleotide with phosphorothioate linkage
  modified_base 43: mod_base = OTHER; note = 2'-O-methyl modified nucleotide with phosphorothioate linkage
  modified_base 44: mod_base = OTHER; note = 2'-O-methyl modified nucleotide

SEQ ID NO: 198 - RNA, 44 nt, synthetic construct; identical to SEQ ID NO: 193
  source 1..44: mol_type = other RNA
  modified_base 1: mod_base = OTHER; note = 2'-O-methyl modified nucleotide with phosphorothioate linkage
  modified_base 2: mod_base = OTHER; note = 2'-O-methyl modified nucleotide with phosphorothioate linkage
  modified_base 6: mod_base = OTHER; note = 2'-O-methyl modified nucleotide
  modified_base 7: mod_base = OTHER; note = 2'-O-methyl modified nucleotide
  modified_base 10: mod_base = OTHER; note = 2'-O-methyl modified nucleotide
  modified_base 11: mod_base = OTHER; note = 2'-O-methyl modified nucleotide
  modified_base 13: mod_base = OTHER; note = 2'-O-methyl modified nucleotide
  modified_base 14: mod_base = OTHER; note = 2'-O-methyl modified nucleotide
  modified_base 15: mod_base = OTHER; note = 2'-O-methyl modified nucleotide
  modified_base 17: mod_base = OTHER; note = 2'-O-methyl modified nucleotide
  modified_base 18: mod_base = OTHER; note = 2'-O-methyl modified nucleotide
  modified_base 19: mod_base = OTHER; note = 2'-O-methyl modified nucleotide
  modified_base 20: mod_base = OTHER; note = 2'-O-methyl modified nucleotide
  modified_base 22: mod_base = OTHER; note = 2'-O-methyl modified nucleotide
  modified_base 29: mod_base = OTHER; note = 2'-O-methyl modified nucleotide
  modified_base 30: mod_base = OTHER; note = 2'-O-methyl modified nucleotide
  modified_base 31: mod_base = OTHER; note = 2'-O-methyl modified nucleotide
  modified_base 33: mod_base = OTHER; note = 2'-O-methyl modified nucleotide
  modified_base 40: mod_base = OTHER; note = 2'-O-methyl modified nucleotide
  modified_base 41: mod_base = OTHER; note = 2'-O-methyl modified nucleotide
  modified_base 42: mod_base = OTHER; note = 2'-O-methyl modified nucleotide with phosphorothioate linkage
  modified_base 43: mod_base = OTHER; note = 2'-O-methyl modified nucleotide with phosphorothioate linkage
  modified_base 44: mod_base = OTHER; note = 2'-O-methyl modified nucleotide

SEQ ID NO: 199 - RNA, 46 nt, synthetic construct
  source 1..46: mol_type = other RNA
  modified_base 1: mod_base = OTHER; note = 2'-O-methyl modified nucleotide with phosphorothioate linkage
  modified_base 2: mod_base = OTHER; note = 2'-O-methyl modified nucleotide with phosphorothioate linkage
  modified_base 8: mod_base = OTHER; note = 2'-O-methyl modified nucleotide
  modified_base 9: mod_base = OTHER; note = 2'-O-methyl modified nucleotide
  modified_base 12: mod_base = OTHER; note = 2'-O-methyl modified nucleotide
  modified_base 13: mod_base = OTHER; note = 2'-O-methyl modified nucleotide
  modified_base 15: mod_base = OTHER; note = 2'-O-methyl modified nucleotide
  modified_base 16: mod_base = OTHER; note = 2'-O-methyl modified nucleotide
  modified_base 17: mod_base = OTHER; note = 2'-O-methyl modified nucleotide
  modified_base 19: mod_base = OTHER; note = 2'-O-methyl modified nucleotide
  modified_base 20: mod_base = OTHER; note = 2'-O-methyl modified nucleotide
  modified_base 21: mod_base = OTHER; note = 2'-O-methyl modified nucleotide
  modified_base 22: mod_base = OTHER; note = 2'-O-methyl modified nucleotide
  modified_base 24: mod_base = OTHER; note = 2'-O-methyl modified nucleotide
  modified_base 31: mod_base = OTHER; note = 2'-O-methyl modified nucleotide
  modified_base 32: mod_base = OTHER; note = 2'-O-methyl modified nucleotide
  modified_base 33: mod_base = OTHER; note = 2'-O-methyl modified nucleotide
  modified_base 35: mod_base = OTHER; note = 2'-O-methyl modified nucleotide
  modified_base 42: mod_base = OTHER; note = 2'-O-methyl modified nucleotide
  modified_base 43: mod_base = OTHER; note = 2'-O-methyl modified nucleotide
  modified_base 44: mod_base = OTHER; note = 2'-O-methyl modified nucleotide with phosphorothioate linkage
  modified_base 45: mod_base = OTHER; note = 2'-O-methyl modified nucleotide with phosphorothioate linkage
  modified_base 46: mod_base = OTHER; note = 2'-O-methyl modified nucleotide
tttgaatttctactgttgtagattcttcgcccagagcatcccatgg

SEQ ID NO: 200 - RNA, 41 nt, synthetic construct
  source 1..41: mol_type = other RNA
  modified_base 1: mod_base = OTHER; note = 2'-O-methyl modified nucleotide with phosphorothioate linkage
  modified_base 2: mod_base = OTHER; note = 2'-O-methyl modified nucleotide with phosphorothioate linkage
  modified_base 3: mod_base = OTHER; note = 2'-O-methyl modified nucleotide
  modified_base 4: mod_base = OTHER; note = 2'-O-methyl modified nucleotide
  modified_base 5: mod_base = OTHER; note = 2'-O-methyl modified nucleotide
  modified_base 6: mod_base = OTHER; note = 2'-O-methyl modified nucleotide
  modified_base 7: mod_base = OTHER; note = 2'-O-methyl modified nucleotide
  modified_base 8: mod_base = OTHER; note = 2'-O-methyl modified nucleotide
  modified_base 9: mod_base = OTHER; note = 2'-O-methyl modified nucleotide
  modified_base 10: mod_base = OTHER; note = 2'-O-methyl modified nucleotide
  modified_base 11: mod_base = OTHER; note = 2'-O-methyl modified nucleotide
  modified_base 12: mod_base = OTHER; note = 2'-O-methyl modified nucleotide
  modified_base 13: mod_base = OTHER; note = 2'-O-methyl modified nucleotide
  modified_base 14: mod_base = OTHER; note = 2'-O-methyl modified nucleotide
  modified_base 15: mod_base = OTHER; note = 2'-O-methyl modified nucleotide
  modified_base 16: mod_base = OTHER; note = 2'-O-methyl modified nucleotide
  modified_base 17: mod_base = OTHER; note = 2'-O-methyl modified nucleotide
  modified_base 18: mod_base = OTHER; note = 2'-O-methyl modified nucleotide
  modified_base 19: mod_base = OTHER; note = 2'-O-methyl modified nucleotide
  modified_base 20: mod_base = OTHER; note = 2'-O-methyl modified nucleotide
  modified_base 21: mod_base = OTHER; note = 2'-O-methyl modified nucleotide
  modified_base 22: mod_base = OTHER; note = 2'-O-methyl modified nucleotide
  modified_base 23: mod_base = OTHER; note = 2'-O-methyl modified nucleotide
  modified_base 24: mod_base = OTHER; note = 2'-O-methyl modified nucleotide
  modified_base 25: mod_base = OTHER; note = 2'-O-methyl modified nucleotide
  modified_base 26: mod_base = OTHER; note = 2'-O-methyl modified nucleotide
  modified_base 27: mod_base = OTHER; note = 2'-O-methyl modified nucleotide
  modified_base 28: mod_base = OTHER; note = 2'-O-methyl modified nucleotide
  modified_base 29: mod_base = OTHER; note = 2'-O-methyl modified nucleotide
  modified_base 30: mod_base = OTHER; note = 2'-O-methyl modified nucleotide
  modified_base 31: mod_base = OTHER; note = 2'-O-methyl modified nucleotide
  modified_base 32: mod_base = OTHER; note = 2'-O-methyl modified nucleotide
  modified_base 33: mod_base = OTHER; note = 2'-O-methyl modified nucleotide
  modified_base 34: mod_base = OTHER; note = 2'-O-methyl modified nucleotide
  modified_base 35: mod_base = OTHER; note = 2'-O-methyl modified nucleotide
  modified_base 36: mod_base = OTHER; note = 2'-O-methyl modified nucleotide
  modified_base 37: mod_base = OTHER; note = 2'-O-methyl modified nucleotide
  modified_base 38: mod_base = OTHER; note = 2'-O-methyl modified nucleotide
  modified_base 39: mod_base = OTHER; note = 2'-O-methyl modified nucleotide with phosphorothioate linkage
  modified_base 40: mod_base = OTHER; note = 2'-O-methyl modified nucleotide with phosphorothioate linkage
  modified_base 41: mod_base = OTHER; note = 2'-O-methyl modified nucleotide
tgaatttctactgttgtagatagtgggggtgaattcagtgt

SEQ ID NO: 201 - RNA, 41 nt, synthetic construct; identical to SEQ ID NO: 200
  source 1..41: mol_type = other RNA
  modified_base 1: mod_base = OTHER; note = 2'-O-methyl modified nucleotide with phosphorothioate linkage
  modified_base 2: mod_base = OTHER; note = 2'-O-methyl modified nucleotide with phosphorothioate linkage
  modified_base 3: mod_base = OTHER; note = 2'-O-methyl modified nucleotide
  modified_base 4: mod_base = OTHER; note = 2'-O-methyl modified nucleotide
  modified_base 5: mod_base = OTHER; note = 2'-O-methyl modified nucleotide
  modified_base 6: mod_base = OTHER; note = 2'-O-methyl modified nucleotide
  modified_base 7: mod_base = OTHER; note = 2'-O-methyl modified nucleotide
  modified_base 8: mod_base = OTHER; note = 2'-O-methyl modified nucleotide
  modified_base 9: mod_base = OTHER; note = 2'-O-methyl modified nucleotide
  modified_base 10: mod_base = OTHER; note = 2'-O-methyl modified nucleotide
  modified_base 11: mod_base = OTHER; note = 2'-O-methyl modified nucleotide
  modified_base 12: mod_base = OTHER; note = 2'-O-methyl modified nucleotide
  modified_base 13: mod_base = OTHER; note = 2'-O-methyl modified nucleotide
  modified_base 14: mod_base = OTHER; note = 2'-O-methyl modified nucleotide
  modified_base 15: mod_base = OTHER; note = 2'-O-methyl modified nucleotide
  modified_base 16: mod_base = OTHER; note = 2'-O-methyl modified nucleotide
  modified_base 17: mod_base = OTHER; note = 2'-O-methyl modified nucleotide
  modified_base 18: mod_base = OTHER; note = 2'-O-methyl modified nucleotide
  modified_base 19: mod_base = OTHER; note = 2'-O-methyl modified nucleotide
  modified_base 20: mod_base = OTHER; note = 2'-O-methyl modified nucleotide
  modified_base 21: mod_base = OTHER; note = 2'-O-methyl modified nucleotide
  modified_base 22: mod_base = OTHER; note = 2'-O-methyl modified nucleotide
  modified_base 23: mod_base = OTHER; note = 2'-O-methyl modified nucleotide
  modified_base 24: mod_base = OTHER; note = 2'-O-methyl modified nucleotide
  modified_base 28: mod_base = OTHER; note = 2'-O-methyl modified nucleotide
  modified_base 29: mod_base = OTHER; note = 2'-O-methyl modified nucleotide
  modified_base 30: mod_base = OTHER; note = 2'-O-methyl modified nucleotide
  modified_base 31: mod_base = OTHER; note = 2'-O-methyl modified nucleotide
  modified_base 32: mod_base = OTHER; note = 2'-O-methyl modified nucleotide
  modified_base 33: mod_base = OTHER; note = 2'-O-methyl modified nucleotide
  modified_base 35: mod_base = OTHER; note = 2'-O-methyl modified nucleotide
  modified_base 36: mod_base = OTHER; note = 2'-O-methyl modified nucleotide
  modified_base 38: mod_base = OTHER; note = 2'-O-methyl modified nucleotide
  modified_base 39: mod_base = OTHER; note = 2'-O-methyl modified nucleotide with phosphorothioate linkage
  modified_base 40: mod_base = OTHER; note = 2'-O-methyl modified nucleotide with phosphorothioate linkage
  modified_base 41: mod_base = OTHER; note = 2'-O-methyl modified nucleotide

SEQ ID NO: 202 - RNA, 41 nt, synthetic construct; identical to SEQ ID NO: 200
  source 1..41: mol_type = other RNA
  modified_base 1: mod_base = OTHER; note = 2'-O-methyl modified nucleotide with phosphorothioate linkage
  modified_base 2: mod_base = OTHER; note = 2'-O-methyl modified nucleotide with phosphorothioate linkage
  modified_base 6: mod_base = OTHER; note = 2'-O-methyl modified nucleotide
  modified_base 7: mod_base = OTHER; note = 2'-O-methyl modified nucleotide
  modified_base 8: mod_base = OTHER; note = 2'-O-methyl modified nucleotide
  modified_base 9: mod_base = OTHER; note = 2'-O-methyl modified nucleotide
  modified_base 10: mod_base = OTHER; note = 2'-O-methyl modified nucleotide
  modified_base 11: mod_base = OTHER; note = 2'-O-methyl modified nucleotide
  modified_base 13: mod_base = OTHER; note = 2'-O-methyl modified nucleotide
  modified_base 14: mod_base = OTHER; note = 2'-O-methyl modified nucleotide
  modified_base 15: mod_base = OTHER; note = 2'-O-methyl modified nucleotide
  modified_base 17: mod_base = OTHER; note = 2'-O-methyl modified nucleotide
  modified_base 18: mod_base = OTHER; note = 2'-O-methyl modified nucleotide
  modified_base 19: mod_base = OTHER; note = 2'-O-methyl modified nucleotide
  modified_base 20: mod_base = OTHER; note = 2'-O-methyl modified nucleotide
  modified_base 22: mod_base = OTHER; note = 2'-O-methyl modified nucleotide
  modified_base 23: mod_base = OTHER; note = 2'-O-methyl modified nucleotide
  modified_base 24: mod_base = OTHER; note = 2'-O-methyl modified nucleotide
  modified_base 28: mod_base = OTHER; note = 2'-O-methyl modified nucleotide
  modified_base 29: mod_base = OTHER; note = 2'-O-methyl modified nucleotide
  modified_base 30: mod_base = OTHER; note = 2'-O-methyl modified nucleotide
  modified_base 31: mod_base = OTHER; note = 2'-O-methyl modified nucleotide
  modified_base 32: mod_base = OTHER; note = 2'-O-methyl modified nucleotide
  modified_base 33: mod_base = OTHER; note = 2'-O-methyl modified nucleotide
  modified_base 35: mod_base = OTHER; note = 2'-O-methyl modified nucleotide
  modified_base 36: mod_base = OTHER; note = 2'-O-methyl modified nucleotide
  modified_base 38: mod_base = OTHER; note = 2'-O-methyl modified nucleotide
  modified_base 39: mod_base = OTHER; note = 2'-O-methyl modified nucleotide with phosphorothioate linkage
  modified_base 40: mod_base = OTHER; note = 2'-O-methyl modified nucleotide with phosphorothioate linkage
  modified_base 41: mod_base = OTHER; note = 2'-O-methyl modified nucleotide

SEQ ID NO: 203 - RNA, 41 nt, synthetic construct; identical to SEQ ID NO: 200
  source 1..41: mol_type = other RNA
  modified_base 1: mod_base = OTHER; note = 2'-O-methyl modified nucleotide with phosphorothioate linkage
  modified_base 2: mod_base = OTHER; note = 2'-O-methyl modified nucleotide with phosphorothioate linkage
  modified_base 6: mod_base = OTHER; note = 2'-O-methyl modified nucleotide
  modified_base 7: mod_base = OTHER; note = 2'-O-methyl modified nucleotide
  modified_base 8: mod_base = OTHER; note = 2'-O-methyl modified nucleotide
  modified_base 9: mod_base = OTHER; note = 2'-O-methyl modified nucleotide
  modified_base 10: mod_base = OTHER; note = 2'-O-methyl modified nucleotide
  modified_base 11: mod_base = OTHER; note = 2'-O-methyl modified nucleotide
  modified_base 13: mod_base = OTHER; note = 2'-O-methyl modified nucleotide
  modified_base 14: mod_base = OTHER; note = 2'-O-methyl modified nucleotide
  modified_base 15: mod_base = OTHER; note = 2'-O-methyl modified nucleotide
  modified_base 17: mod_base = OTHER; note = 2'-O-methyl modified nucleotide
  modified_base 18: mod_base = OTHER; note = 2'-O-methyl modified nucleotide
  modified_base 19: mod_base = OTHER; note = 2'-O-methyl modified nucleotide
  modified_base 20: mod_base = OTHER; note = 2'-O-methyl modified nucleotide
  modified_base 22: mod_base = OTHER; note = 2'-O-methyl modified nucleotide
  modified_base 23: mod_base = OTHER; note = 2'-O-methyl modified nucleotide
  modified_base 24: mod_base = OTHER; note = 2'-O-methyl modified nucleotide
  modified_base 25: mod_base = OTHER; note = 2'-O-methyl modified nucleotide
  modified_base 26: mod_base = OTHER; note = 2'-O-methyl modified nucleotide
  modified_base 27: mod_base = OTHER; note = 2'-O-methyl modified nucleotide
  modified_base 28: mod_base = OTHER; note = 2'-O-methyl modified nucleotide
  modified_base 29: mod_base = OTHER; note = 2'-O-methyl modified nucleotide
  modified_base 30: mod_base = OTHER; note = 2'-O-methyl modified nucleotide
  modified_base 31: mod_base = OTHER; note = 2'-O-methyl modified nucleotide
  modified_base 32: mod_base = OTHER; note = 2'-O-methyl modified nucleotide
  modified_base 33: mod_base = OTHER; note = 2'-O-methyl modified nucleotide
  modified_base 34: mod_base = OTHER; note = 2'-O-methyl modified nucleotide
  modified_base 35: mod_base = OTHER; note = 2'-O-methyl modified nucleotide
  modified_base 36: mod_base = OTHER; note = 2'-O-methyl modified nucleotide
  modified_base 37: mod_base = OTHER; note = 2'-O-methyl modified nucleotide
  modified_base 38: mod_base = OTHER; note = 2'-O-methyl modified nucleotide
  modified_base 39: mod_base = OTHER; note = 2'-O-methyl modified nucleotide with phosphorothioate linkage
  modified_base 40: mod_base = OTHER; note = 2'-O-methyl modified nucleotide with phosphorothioate linkage
  modified_base 41: mod_base = OTHER; note = 2'-O-methyl modified nucleotide

SEQ ID NO: 204 - RNA, 41 nt, synthetic construct; identical to SEQ ID NO: 200
  source 1..41: mol_type = other RNA
  modified_base 1: mod_base = OTHER; note = 2'-O-methyl modified nucleotide with phosphorothioate linkage
  modified_base 2: mod_base = OTHER; note = 2'-O-methyl modified nucleotide with phosphorothioate linkage
  modified_base 6: mod_base = OTHER; note = 2'-O-methyl modified nucleotide
  modified_base 7: mod_base = OTHER; note = 2'-O-methyl modified nucleotide
  modified_base 10: mod_base = OTHER; note = 2'-O-methyl modified nucleotide
  modified_base 11: mod_base = OTHER; note = 2'-O-methyl modified nucleotide
  modified_base 13: mod_base = OTHER; note = 2'-O-methyl modified nucleotide
  modified_base 14: mod_base = OTHER; note = 2'-O-methyl modified nucleotide
  modified_base 15: mod_base = OTHER; note = 2'-O-methyl modified nucleotide
  modified_base 17: mod_base = OTHER; note = 2'-O-methyl modified nucleotide
  modified_base 18: mod_base = OTHER; note = 2'-O-methyl modified nucleotide
  modified_base 19: mod_base = OTHER; note = 2'-O-methyl modified nucleotide
  modified_base 20: mod_base = OTHER; note = 2'-O-methyl modified nucleotide
  modified_base 22: mod_base = OTHER; note = 2'-O-methyl modified nucleotide
  modified_base 23: mod_base = OTHER; note = 2'-O-methyl modified nucleotide
  modified_base 24: mod_base = OTHER; note = 2'-O-methyl modified nucleotide
  modified_base 29: mod_base = OTHER; note = 2'-O-methyl modified nucleotide
  modified_base 30: mod_base = OTHER; note = 2'-O-methyl modified nucleotide
  modified_base 31: mod_base = OTHER; note = 2'-O-methyl modified nucleotide
  modified_base 33: mod_base = OTHER; note = 2'-O-methyl modified nucleotide
  modified_base 35: mod_base = OTHER; note = 2'-O-methyl modified nucleotide
  modified_base 36: mod_base = OTHER; note = 2'-O-methyl modified nucleotide
  modified_base 39: mod_base = OTHER; note = Nucleotide with phosphorothioate linkage
  modified_base 40: mod_base = OTHER; note = 2'-O-methyl modified nucleotide with phosphorothioate linkage
  modified_base 41: mod_base = OTHER; note = 2'-O-methyl modified nucleotide

SEQ ID NO: 205 - RNA, 41 nt, synthetic construct; identical to SEQ ID NO: 200
  source 1..41: mol_type = other RNA
  modified_base 1: mod_base = OTHER; note = 2'-O-methyl modified nucleotide with phosphorothioate linkage
  modified_base 2: mod_base = OTHER; note = 2'-O-methyl modified nucleotide with phosphorothioate linkage
  modified_base 6: mod_base = OTHER; note = 2'-O-methyl modified nucleotide
  modified_base 7: mod_base = OTHER; note = 2'-O-methyl modified nucleotide
  modified_base 10: mod_base = OTHER; note = 2'-O-methyl modified nucleotide
  modified_base 11: mod_base = OTHER; note = 2'-O-methyl modified nucleotide
  modified_base 13: mod_base = OTHER; note = 2'-O-methyl modified nucleotide
  modified_base 14: mod_base = OTHER; note = 2'-O-methyl modified nucleotide
  modified_base 15: mod_base = OTHER; note = 2'-O-methyl modified nucleotide
  modified_base 17: mod_base = OTHER; note = 2'-O-methyl modified nucleotide
  modified_base 18: mod_base = OTHER; note = 2'-O-methyl modified nucleotide
  modified_base 19: mod_base = OTHER; note = 2'-O-methyl modified nucleotide
  modified_base 20: mod_base = OTHER; note = 2'-O-methyl modified nucleotide
  modified_base 22: mod_base = OTHER; note = 2'-O-methyl modified nucleotide
  modified_base 29: mod_base = OTHER; note = 2'-O-methyl modified nucleotide
  modified_base 30: mod_base = OTHER; note = 2'-O-methyl modified nucleotide
  modified_base 31: mod_base = OTHER; note = 2'-O-methyl modified nucleotide
  modified_base 33: mod_base = OTHER; note = 2'-O-methyl modified nucleotide
  modified_base 39: mod_base = OTHER; note = Nucleotide with phosphorothioate linkage
  modified_base 40: mod_base = OTHER; note = 2'-O-methyl modified nucleotide with phosphorothioate linkage
  modified_base 41: mod_base = OTHER; note = 2'-O-methyl modified nucleotide

SEQ ID NO: 206 - RNA, 43 nt, synthetic construct
  source 1..43: mol_type = other RNA
  modified_base 1: mod_base = OTHER; note = 2'-O-methyl modified nucleotide with phosphorothioate linkage
  modified_base 2: mod_base = OTHER; note = 2'-O-methyl modified nucleotide with phosphorothioate linkage
  modified_base 8: mod_base = OTHER; note = 2'-O-methyl modified nucleotide
  modified_base 9: mod_base = OTHER; note = 2'-O-methyl modified nucleotide
  modified_base 13: mod_base = OTHER; note = 2'-O-methyl modified nucleotide
  modified_base 15: mod_base = OTHER; note = 2'-O-methyl modified nucleotide
  modified_base 16: mod_base = OTHER; note = 2'-O-methyl modified nucleotide
  modified_base 17: mod_base = OTHER; note = 2'-O-methyl modified nucleotide
  modified_base 20: mod_base = OTHER; note = 2'-O-methyl modified nucleotide
  modified_base 21: mod_base = OTHER; note = 2'-O-methyl modified nucleotide
  modified_base 22: mod_base = OTHER; note = 2'-O-methyl modified nucleotide
  modified_base 24: mod_base = OTHER; note = 2'-O-methyl modified nucleotide
  modified_base 31: mod_base = OTHER; note = 2'-O-methyl modified nucleotide
  modified_base 32: mod_base = OTHER; note = 2'-O-methyl modified nucleotide
  modified_base 33: mod_base = OTHER; note = 2'-O-methyl modified nucleotide
  modified_base 35: mod_base = OTHER; note = 2'-O-methyl modified nucleotide
  modified_base 41: mod_base = OTHER; note = Nucleotide with phosphorothioate linkage
  modified_base 42: mod_base = OTHER; note = 2'-O-methyl modified nucleotide with phosphorothioate linkage
  modified_base 43: mod_base = OTHER; note = 2'-O-methyl modified nucleotide
tttgaatttctactgttgtagatagtgggggtgaattcagtgt

SEQ ID NO: 207 - RNA, 42 nt, synthetic construct
  source 1..42: mol_type = other RNA
  modified_base 1: mod_base = OTHER; note = 2'-O-methyl modified nucleotide with phosphorothioate linkage
  modified_base 2: mod_base = OTHER; note = 2'-O-methyl modified nucleotide with phosphorothioate linkage
  modified_base 3: mod_base = OTHER; note = 2'-O-methyl modified nucleotide
  modified_base 4: mod_base = OTHER; note = 2'-O-methyl modified nucleotide
  modified_base 5: mod_base = OTHER; note = 2'-O-methyl modified nucleotide
  modified_base 6: mod_base = OTHER; note = 2'-O-methyl modified nucleotide
  modified_base 7: mod_base = OTHER; note = 2'-O-methyl modified nucleotide
  modified_base 8: mod_base = OTHER; note = 2'-O-methyl modified nucleotide
  modified_base 9: mod_base = OTHER; note = 2'-O-methyl modified nucleotide
  modified_base 10: mod_base = OTHER; note = 2'-O-methyl modified nucleotide
  modified_base 11: mod_base = OTHER; note = 2'-O-methyl modified nucleotide
  modified_base 12: mod_base = OTHER; note = 2'-O-methyl modified nucleotide
  modified_base 13: mod_base = OTHER; note = 2'-O-methyl modified nucleotide
  modified_base 14: mod_base = OTHER; note = 2'-O-methyl modified nucleotide
  modified_base 15: mod_base = OTHER; note = 2'-O-methyl modified nucleotide
  modified_base 16: mod_base = OTHER; note = 2'-O-methyl modified nucleotide
  modified_base 17: mod_base = OTHER; note = 2'-O-methyl modified nucleotide
  modified_base 18: mod_base = OTHER; note = 2'-O-methyl modified nucleotide
  modified_base 19: mod_base = OTHER; note = 2'-O-methyl modified nucleotide
  modified_base 20: mod_base = OTHER; note = 2'-O-methyl modified nucleotide
  modified_base 21: mod_base = OTHER; note = 2'-O-methyl modified nucleotide
  modified_base 22: mod_base = OTHER; note = 2'-O-methyl modified nucleotide
  modified_base 23: mod_base = OTHER; note = 2'-O-methyl modified nucleotide
  modified_base 24: mod_base = OTHER; note = 2'-O-methyl modified nucleotide
  modified_base 25: mod_base = OTHER; note = 2'-O-methyl modified nucleotide
  modified_base 26: mod_base = OTHER; note = 2'-O-methyl modified nucleotide
  modified_base 27: mod_base = OTHER; note = 2'-O-methyl modified nucleotide
  modified_base 28: mod_base = OTHER; note = 2'-O-methyl modified nucleotide
  modified_base 29: mod_base = OTHER; note = 2'-O-methyl modified nucleotide
  modified_base 30: mod_base = OTHER; note = 2'-O-methyl modified nucleotide
  modified_base 31: mod_base = OTHER; note = 2'-O-methyl modified nucleotide
  modified_base 32: mod_base = OTHER; note = 2'-O-methyl modified nucleotide
  modified_base 33: mod_base = OTHER; note = 2'-O-methyl modified nucleotide
  modified_base 34: mod_base = OTHER; note = 2'-O-methyl modified nucleotide
  modified_base 35: mod_base = OTHER; note = 2'-O-methyl modified nucleotide
  modified_base 36: mod_base = OTHER; note = 2'-O-methyl modified nucleotide
  modified_base 37: mod_base = OTHER; note = 2'-O-methyl modified nucleotide
  modified_base 38: mod_base = OTHER; note = 2'-O-methyl modified nucleotide
  modified_base 39: mod_base = OTHER; note = 2'-O-methyl modified nucleotide
  modified_base 40: mod_base = OTHER; note = 2'-O-methyl modified nucleotide with phosphorothioate linkage
  modified_base 41: mod_base = OTHER; note = 2'-O-methyl modified nucleotide with phosphorothioate linkage
  modified_base 42: mod_base = OTHER; note = 2'-O-methyl modified nucleotide
tgaatttctactgttgtagatccttgtcaaggctattggtca

SEQ ID NO: 208 - RNA, 42 nt, synthetic construct; identical to SEQ ID NO: 207
  source 1..42: mol_type = other RNA
  modified_base 1: mod_base = OTHER; note = 2'-O-methyl modified nucleotide with phosphorothioate linkage
  modified_base 2: mod_base = OTHER; note = 2'-O-methyl modified nucleotide with phosphorothioate linkage
  modified_base 3: mod_base = OTHER; note = 2'-O-methyl modified nucleotide
  modified_base 4: mod_base = OTHER; note = 2'-O-methyl modified nucleotide
  modified_base 5: mod_base = OTHER; note = 2'-O-methyl modified nucleotide
  modified_base 6: mod_base = OTHER; note = 2'-O-methyl modified nucleotide
  modified_base 7: mod_base = OTHER; note = 2'-O-methyl modified nucleotide
  modified_base 8: mod_base = OTHER; note = 2'-O-methyl modified nucleotide
  modified_base 9: mod_base = OTHER; note = 2'-O-methyl modified nucleotide
  modified_base 10: mod_base = OTHER; note = 2'-O-methyl modified nucleotide
  modified_base 11: mod_base = OTHER; note = 2'-O-methyl modified nucleotide
  modified_base 12: mod_base = OTHER; note = 2'-O-methyl modified nucleotide
  modified_base 13: mod_base = OTHER; note = 2'-O-methyl modified nucleotide
  modified_base 14: mod_base = OTHER; note = 2'-O-methyl modified nucleotide
  modified_base 15: mod_base = OTHER; note = 2'-O-methyl modified nucleotide
  modified_base 16: mod_base = OTHER; note = 2'-O-methyl modified nucleotide
  modified_base 17: mod_base = OTHER; note = 2'-O-methyl modified nucleotide
  modified_base 18: mod_base = OTHER; note = 2'-O-methyl modified nucleotide
  modified_base 19: mod_base = OTHER; note = 2'-O-methyl modified nucleotide
  modified_base 20: mod_base = OTHER; note = 2'-O-methyl modified nucleotide
  modified_base 21: mod_base = OTHER; note = 2'-O-methyl modified nucleotide
  modified_base 22: mod_base = OTHER; note = 2'-O-methyl modified nucleotide
  modified_base 23: mod_base = OTHER; note = 2'-O-methyl modified nucleotide
  modified_base 24: mod_base = OTHER; note = 2'-O-methyl modified nucleotide
  modified_base 28: mod_base = OTHER; note = 2'-O-methyl modified nucleotide
  modified_base 29: mod_base = OTHER; note = 2'-O-methyl modified nucleotide
  modified_base 30: mod_base = OTHER; note = 2'-O-methyl modified nucleotide
  modified_base 31: mod_base = OTHER; note = 2'-O-methyl modified nucleotide
  modified_base 32: mod_base = OTHER; note = 2'-O-methyl modified nucleotide
  modified_base 33: mod_base = OTHER; note = 2'-O-methyl modified nucleotide
  modified_base 35: mod_base = OTHER; note = 2'-O-methyl modified nucleotide
  modified_base 36: mod_base = OTHER; note = 2'-O-methyl modified nucleotide
  modified_base 38: mod_base = OTHER; note = 2'-O-methyl modified nucleotide
  modified_base 39: mod_base = OTHER; note = 2'-O-methyl modified nucleotide
  modified_base 40: mod_base = OTHER; note = 2'-O-methyl modified nucleotide with phosphorothioate linkage
  modified_base 41: mod_base = OTHER; note = 2'-O-methyl modified nucleotide with phosphorothioate linkage
  modified_base 42: mod_base = OTHER; note = 2'-O-methyl modified nucleotide

SEQ ID NO: 209 - RNA, 42 nt, synthetic construct; identical to SEQ ID NO: 207
  source 1..42: mol_type = other RNA
  modified_base 1: mod_base = OTHER; note = 2'-O-methyl modified nucleotide with phosphorothioate linkage
  modified_base 2: mod_base = OTHER; note = 2'-O-methyl modified nucleotide with phosphorothioate linkage
  modified_base 6: mod_base = OTHER; note = 2'-O-methyl modified nucleotide
  modified_base 7: mod_base = OTHER; note = 2'-O-methyl modified nucleotide
  modified_base 8: mod_base = OTHER; note = 2'-O-methyl modified nucleotide
  modified_base 9: mod_base = OTHER; note = 2'-O-methyl modified nucleotide
  modified_base 10: mod_base = OTHER; note = 2'-O-methyl modified nucleotide
  modified_base 11: mod_base = OTHER; note = 2'-O-methyl modified nucleotide
  modified_base 13: mod_base = OTHER; note = 2'-O-methyl modified nucleotide
  modified_base 14: mod_base = OTHER; note = 2'-O-methyl modified nucleotide
  modified_base 15: mod_base = OTHER; note = 2'-O-methyl modified nucleotide
  modified_base 17: mod_base = OTHER; note = 2'-O-methyl modified nucleotide
  modified_base 18: mod_base = OTHER; note = 2'-O-methyl modified nucleotide
  modified_base 19: mod_base = OTHER; note = 2'-O-methyl modified nucleotide
  modified_base 20: mod_base = OTHER; note = 2'-O-methyl modified nucleotide
  modified_base 22: mod_base = OTHER; note = 2'-O-methyl modified nucleotide
  modified_base 23: mod_base = OTHER; note = 2'-O-methyl modified nucleotide
  modified_base 24: mod_base = OTHER; note = 2'-O-methyl modified nucleotide
  modified_base 25: mod_base = OTHER; note = 2'-O-methyl modified nucleotide
  modified_base 26: mod_base = OTHER; note = 2'-O-methyl modified nucleotide
  modified_base 27: mod_base = OTHER; note = 2'-O-methyl modified nucleotide
  modified_base 28: mod_base = OTHER; note = 2'-O-methyl modified nucleotide
  modified_base 29: mod_base = OTHER; note = 2'-O-methyl modified nucleotide
  modified_base 30: mod_base = OTHER; note = 2'-O-methyl modified nucleotide
  modified_base 31: mod_base = OTHER; note = 2'-O-methyl modified nucleotide
  modified_base 32: mod_base = OTHER; note = 2'-O-methyl modified nucleotide
  modified_base 33: mod_base = OTHER; note = 2'-O-methyl modified nucleotide
  modified_base 34: mod_base = OTHER; note = 2'-O-methyl modified nucleotide
  modified_base 35: mod_base = OTHER; note = 2'-O-methyl modified nucleotide
  modified_base 36: mod_base = OTHER; note = 2'-O-methyl modified nucleotide
  modified_base 37: mod_base = OTHER; note = 2'-O-methyl modified nucleotide
  modified_base 38: mod_base = OTHER; note = 2'-O-methyl modified nucleotide
  modified_base 39: mod_base = OTHER; note = 2'-O-methyl modified nucleotide
  modified_base 40: mod_base = OTHER; note = 2'-O-methyl modified nucleotide with phosphorothioate linkage
  modified_base 41: mod_base = OTHER; note = 2'-O-methyl modified nucleotide with phosphorothioate linkage
  modified_base 42: mod_base = OTHER; note = 2'-O-methyl modified nucleotide

SEQ ID NO: 210 - RNA, 42 nt, synthetic construct; identical to SEQ ID NO: 207
  source 1..42: mol_type = other RNA
  modified_base 1: mod_base = OTHER; note = 2'-O-methyl modified nucleotide with phosphorothioate linkage
  modified_base 2: mod_base = OTHER; note = 2'-O-methyl modified nucleotide with phosphorothioate linkage
  modified_base 6: mod_base = OTHER; note = 2'-O-methyl modified nucleotide
  modified_base 7: mod_base = OTHER; note = 2'-O-methyl modified nucleotide
  modified_base 8: mod_base = OTHER; note = 2'-O-methyl modified nucleotide
  modified_base 9: mod_base = OTHER; note = 2'-O-methyl modified nucleotide
  modified_base 10: mod_base = OTHER; note = 2'-O-methyl modified nucleotide
  modified_base 11: mod_base = OTHER; note = 2'-O-methyl modified nucleotide
  modified_base 13: mod_base = OTHER; note = 2'-O-methyl modified nucleotide
  modified_base 14: mod_base = OTHER; note = 2'-O-methyl modified nucleotide
  modified_base 15: mod_base = OTHER; note = 2'-O-methyl modified nucleotide
  modified_base 17: mod_base = OTHER; note = 2'-O-methyl modified nucleotide
  modified_base 18: mod_base = OTHER; note = 2'-O-methyl modified nucleotide
  modified_base 19: mod_base = OTHER; note = 2'-O-methyl modified nucleotide
  modified_base 20: mod_base = OTHER; note = 2'-O-methyl modified nucleotide
  modified_base 22: mod_base = OTHER; note = 2'-O-methyl modified nucleotide
  modified_base 23: mod_base = OTHER; note = 2'-O-methyl modified nucleotide
  modified_base 24: mod_base = OTHER; note = 2'-O-methyl modified nucleotide
  modified_base 28: mod_base = OTHER; note = 2'-O-methyl modified nucleotide
  modified_base 29: mod_base = OTHER; note = 2'-O-methyl modified nucleotide
  modified_base 30: mod_base = OTHER; note = 2'-O-methyl modified nucleotide
  modified_base 31: mod_base = OTHER; note = 2'-O-methyl modified nucleotide
  modified_base 32: mod_base = OTHER; note = 2'-O-methyl modified nucleotide
  modified_base 33: mod_base = OTHER; note = 2'-O-methyl modified nucleotide
  modified_base 35: mod_base = OTHER; note = 2'-O-methyl modified nucleotide
  modified_base 36: mod_base = OTHER; note = 2'-O-methyl modified nucleotide
  modified_base 38: mod_base = OTHER; note = 2'-O-methyl modified nucleotide
  modified_base 39: mod_base = OTHER; note = 2'-O-methyl modified nucleotide
  modified_base 40: mod_base = OTHER; note = 2'-O-methyl modified nucleotide with phosphorothioate linkage
  modified_base 41: mod_base = OTHER; note = 2'-O-methyl modified nucleotide with phosphorothioate linkage
  modified_base 42: mod_base = OTHER; note = 2'-O-methyl modified nucleotide

SEQ ID NO: 211 - RNA, 42 nt, synthetic construct; identical to SEQ ID NO: 207
  source 1..42: mol_type = other RNA
  modified_base 1: mod_base = OTHER; note = 2'-O-methyl modified nucleotide with phosphorothioate linkage
  modified_base 2: mod_base = OTHER; note = 2'-O-methyl modified nucleotide with phosphorothioate linkage
  modified_base 6: mod_base = OTHER; note = 2'-O-methyl modified nucleotide
  modified_base 7: mod_base = OTHER; note = 2'-O-methyl modified nucleotide
  modified_base 10: mod_base = OTHER; note = 2'-O-methyl modified nucleotide
  modified_base 11: mod_base = OTHER; note = 2'-O-methyl modified nucleotide
  modified_base 13: mod_base = OTHER; note = 2'-O-methyl modified nucleotide
  modified_base 14: mod_base = OTHER; note = 2'-O-methyl modified nucleotide
  modified_base 15: mod_base = OTHER; note = 2'-O-methyl modified nucleotide
  modified_base 17: mod_base = OTHER; note = 2'-O-methyl modified nucleotide
  modified_base 18: mod_base = OTHER; note = 2'-O-methyl modified nucleotide
  modified_base 19: mod_base = OTHER; note = 2'-O-methyl modified nucleotide
  modified_base 20: mod_base = OTHER; note = 2'-O-methyl modified nucleotide
  modified_base 22: mod_base = OTHER; note = 2'-O-methyl modified nucleotide
  modified_base 23: mod_base = OTHER; note = 2'-O-methyl modified nucleotide
  modified_base 24: mod_base = OTHER; note = 2'-O-methyl modified nucleotide
  modified_base 29: mod_base = OTHER; note = 2'-O-methyl modified nucleotide
  modified_base 30: mod_base = OTHER; note = 2'-O-methyl modified nucleotide
  modified_base 31: mod_base = OTHER; note = 2'-O-methyl modified nucleotide
  modified_base 33: mod_base = OTHER; note = 2'-O-methyl modified nucleotide
  modified_base 35: mod_base = OTHER; note = 2'-O-methyl modified nucleotide
  modified_base 36: mod_base = OTHER; note = 2'-O-methyl modified nucleotide
  modified_base 40: mod_base = OTHER; note = 2'-O-methyl modified nucleotide with phosphorothioate linkage
  modified_base 41: mod_base = OTHER; note = 2'-O-methyl modified nucleotide with phosphorothioate linkage
  modified_base 42: mod_base = OTHER; note = 2'-O-methyl modified nucleotide

SEQ ID NO: 212 - RNA, 42 nt, synthetic construct; identical to SEQ ID NO: 207
  source 1..42: mol_type = other RNA
  modified_base 1: mod_base = OTHER; note = 2'-O-methyl modified nucleotide with phosphorothioate linkage
  modified_base 2: mod_base = OTHER; note = 2'-O-methyl modified nucleotide with phosphorothioate linkage
  modified_base 6: mod_base = OTHER; note = 2'-O-methyl modified nucleotide
  modified_base 7: mod_base = OTHER; note = 2'-O-methyl modified nucleotide
  modified_base 10: mod_base = OTHER; note = 2'-O-methyl modified nucleotide
  modified_base 11: mod_base = OTHER; note = 2'-O-methyl modified nucleotide
  modified_base 13: mod_base = OTHER; note = 2'-O-methyl modified nucleotide
  modified_base 14: mod_base = OTHER; note = 2'-O-methyl modified nucleotide
  modified_base 15: mod_base = OTHER; note = 2'-O-methyl modified nucleotide
  modified_base 17: mod_base = OTHER; note = 2'-O-methyl modified nucleotide
  modified_base 18: mod_base = OTHER; note = 2'-O-methyl modified nucleotide
  modified_base 19: mod_base = OTHER; note = 2'-O-methyl modified nucleotide
  modified_base 20: mod_base = OTHER; note = 2'-O-methyl modified nucleotide
  modified_base 22: mod_base = OTHER; note = 2'-O-methyl modified nucleotide
  modified_base 29: mod_base = OTHER; note = 2'-O-methyl modified nucleotide
  modified_base 30: mod_base = OTHER; note = 2'-O-methyl modified nucleotide
  modified_base 31: mod_base = OTHER; note = 2'-O-methyl modified nucleotide
  modified_base 33: mod_base = OTHER; note = 2'-O-methyl modified nucleotide
  modified_base 40: mod_base = OTHER; note = 2'-O-methyl modified nucleotide with phosphorothioate linkage
  modified_base 41: mod_base = OTHER; note = 2'-O-methyl modified nucleotide with phosphorothioate linkage
  modified_base 42: mod_base = OTHER; note = 2'-O-methyl modified nucleotide

SEQ ID NO: 213 - RNA, 44 nt, synthetic construct; identical to SEQ ID NO: 51
  source 1..44: mol_type = other RNA
  modified_base 1: mod_base = OTHER; note = 2'-O-methyl modified nucleotide with phosphorothioate linkage
  modified_base 2: mod_base = OTHER; note = 2'-O-methyl modified nucleotide with phosphorothioate linkage
  modified_base 8: mod_base = OTHER; note = 2'-O-methyl modified nucleotide
  modified_base 9: mod_base = OTHER; note = 2'-O-methyl modified nucleotide
  modified_base 13: mod_base = OTHER; note = 2'-O-methyl modified nucleotide
  modified_base 15: mod_base = OTHER; note = 2'-O-methyl modified nucleotide
  modified_base 16: mod_base = OTHER; note = 2'-O-methyl modified nucleotide
  modified_base 17: mod_base = OTHER; note = 2'-O-methyl modified nucleotide
  modified_base 20: mod_base = OTHER; note = 2'-O-methyl modified nucleotide
  modified_base 21: mod_base = OTHER; note = 2'-O-methyl modified nucleotide
  modified_base 22: mod_base = OTHER; note = 2'-O-methyl modified nucleotide
  modified_base 24: mod_base = OTHER; note = 2'-O-methyl modified nucleotide
  modified_base 31: mod_base = OTHER; note = 2'-O-methyl modified nucleotide
  modified_base 32: mod_base = OTHER; note = 2'-O-methyl modified nucleotide
  modified_base 33: mod_base = OTHER; note = 2'-O-methyl modified nucleotide
  modified_base 35: mod_base = OTHER; note = 2'-O-methyl modified nucleotide
  modified_base 42: mod_base = OTHER; note = 2'-O-methyl modified nucleotide with phosphorothioate linkage
  modified_base 43: mod_base = OTHER; note = 2'-O-methyl modified nucleotide with phosphorothioate linkage
  modified_base 44: mod_base = OTHER; note = 2'-O-methyl modified nucleotide

SEQ ID NO: 214 - RNA, 41 nt, synthetic construct; identical to SEQ ID NO: 200
  source 1..41: mol_type = other RNA
  modified_base 1: mod_base = OTHER; note = 2'-O-methyl modified nucleotide with phosphorothioate linkage
  modified_base 2: mod_base = OTHER; note = 2'-O-methyl modified nucleotide with phosphorothioate linkage
  modified_base 3: mod_base = OTHER; note = 2'-O-methyl modified nucleotide
  modified_base 4: mod_base = OTHER; note = 2'-O-methyl modified nucleotide
  modified_base 5: mod_base = OTHER; note = 2'-O-methyl modified nucleotide
  modified_base 6: mod_base = OTHER; note = 2'-O-methyl modified nucleotide
  modified_base 7: mod_base = OTHER; note = 2'-O-methyl modified nucleotide
  modified_base 8: mod_base = OTHER; note = 2'-O-methyl modified nucleotide
  modified_base 9: mod_base = OTHER; note = 2'-O-methyl modified nucleotide
  modified_base 10: mod_base = OTHER; note = 2'-O-methyl modified nucleotide
  modified_base 11: mod_base = OTHER; note = 2'-O-methyl modified nucleotide
  modified_base 12: mod_base = OTHER; note = 2'-O-methyl modified nucleotide
  modified_base 13: mod_base = OTHER; note = 2'-O-methyl modified nucleotide
  modified_base 14: mod_base = OTHER; note = 2'-O-methyl modified nucleotide
  modified_base 15: mod_base = OTHER; note = 2'-O-methyl modified nucleotide
  modified_base 16: mod_base = OTHER; note = 2'-O-methyl modified nucleotide
  modified_base 17: mod_base = OTHER; note = 2'-O-methyl modified nucleotide
  modified_base 18: mod_base = OTHER; note = 2'-O-methyl modified nucleotide
  modified_base 19: mod_base = OTHER; note = 2'-O-methyl modified nucleotide
  modified_base 20: mod_base = OTHER; note = 2'-O-methyl modified nucleotide
  modified_base 21: mod_base = OTHER; note = 2'-O-methyl modified nucleotide
  modified_base 22: mod_base = OTHER; note = 2'-O-methyl modified nucleotide
  modified_base 23: mod_base = OTHER; note = 2'-O-methyl modified nucleotide
  modified_base 24: mod_base = OTHER; note = 2'-O-methyl modified nucleotide
  modified_base 25: mod_base = OTHER; note = 2'-O-methyl modified nucleotide
  modified_base 26: mod_base = OTHER; note = 2'-O-methyl modified nucleotide
  modified_base 27: mod_base = OTHER; note = 2'-O-methyl modified nucleotide
  modified_base 28: mod_base = OTHER; note = 2'-O-methyl modified nucleotide
  modified_base 29: mod_base = OTHER; note = 2'-O-methyl modified nucleotide
  modified_base 30: mod_base = OTHER; note = 2'-O-methyl modified nucleotide
  modified_base 31: mod_base = OTHER; note = 2'-O-methyl modified nucleotide
  modified_base 32: mod_base = OTHER; note = 2'-O-methyl modified nucleotide
  modified_base 33: mod_base = OTHER; note = 2'-O-methyl modified nucleotide
  modified_base 34: mod_base = OTHER; note = 2'-O-methyl modified nucleotide
  modified_base 35: mod_base = OTHER; note = 2'-O-methyl modified nucleotide
  modified_base 36: mod_base = OTHER; note = 2'-O-methyl modified nucleotide
  modified_base 37: mod_base = OTHER; note = 2'-O-methyl modified nucleotide
  modified_base 38: mod_base = OTHER; note = 2'-O-methyl modified nucleotide
  modified_base 39: mod_base = OTHER; note = 2'-O-methyl modified nucleotide with phosphorothioate linkage
  modified_base 40: mod_base = OTHER; note = 2'-O-methyl modified nucleotide with phosphorothioate linkage
  modified_base 41: mod_base = OTHER; note = 2'-O-methyl modified nucleotide

SEQ ID NO: 215 - RNA, 41 nt, synthetic construct; identical to SEQ ID NO: 200
  source 1..41: mol_type = other RNA
  modified_base 1: mod_base = OTHER; note = 2'-O-methyl modified nucleotide with phosphorothioate linkage
  modified_base 2: mod_base = OTHER; note = 2'-O-methyl modified nucleotide with phosphorothioate linkage
  modified_base 6: mod_base = OTHER; note = 2'-O-methyl modified nucleotide
  modified_base 7: mod_base = OTHER; note = 2'-O-methyl modified nucleotide
  modified_base 8: mod_base = OTHER; note = 2'-O-methyl modified nucleotide
  modified_base 9: mod_base = OTHER; note = 2'-O-methyl modified nucleotide
  modified_base 10: mod_base = OTHER; note = 2'-O-methyl modified nucleotide
  modified_base 11: mod_base = OTHER; note = 2'-O-methyl modified nucleotide
  modified_base 13: mod_base = OTHER; note = 2'-O-methyl modified nucleotide
  modified_base 14: mod_base = OTHER; note = 2'-O-methyl modified nucleotide
  modified_base 15: mod_base = OTHER; note = 2'-O-methyl modified nucleotide
  modified_base 17: mod_base = OTHER; note = 2'-O-methyl modified nucleotide
  modified_base 18: mod_base = OTHER; note = 2'-O-methyl modified nucleotide
  modified_base 19: mod_base = OTHER; note = 2'-O-methyl modified nucleotide
  modified_base 20: mod_base = OTHER; note = 2'-O-methyl modified nucleotide
  modified_base 22: mod_base = OTHER; note = 2'-O-methyl modified nucleotide
  modified_base 23: mod_base = OTHER; note = 2'-O-methyl modified nucleotide
  modified_base 24: mod_base = OTHER; note = 2'-O-methyl modified nucleotide
  modified_base 28: mod_base = OTHER; note = 2'-O-methyl modified nucleotide
  modified_base 29: mod_base = OTHER; note = 2'-O-methyl modified nucleotide
  modified_base 30: mod_base = OTHER; note = 2'-O-methyl modified nucleotide
  modified_base 31: mod_base = OTHER; note = 2'-O-methyl modified nucleotide
  modified_base 32: mod_base = OTHER; note = 2'-O-methyl modified nucleotide
  modified_base 33: mod_base = OTHER; note = 2'-O-methyl modified nucleotide
  modified_base 35: mod_base = OTHER; note = 2'-O-methyl modified nucleotide
  modified_base 36: mod_base = OTHER; note = 2'-O-methyl modified nucleotide
  modified_base 38: mod_base = OTHER; note = 2'-O-methyl modified nucleotide
  modified_base 39: mod_base = OTHER; note = 2'-O-methyl modified nucleotide with phosphorothioate linkage
  modified_base 40: mod_base = OTHER; note = 2'-O-methyl modified nucleotide with phosphorothioate linkage
  modified_base 41: mod_base = OTHER; note = 2'-O-methyl modified nucleotide

SEQ ID NO: 216 - RNA, 41 nt, synthetic construct; identical to SEQ ID NO: 200
  source 1..41: mol_type = other RNA
  modified_base 1: mod_base = OTHER; note = 2'-O-methyl modified nucleotide with phosphorothioate linkage
  modified_base 2: mod_base = OTHER; note = 2'-O-methyl modified nucleotide with phosphorothioate linkage
  modified_base 6: mod_base = OTHER; note = 2'-O-methyl modified nucleotide
  modified_base 7: mod_base = OTHER; note = 2'-O-methyl modified nucleotide
  modified_base 10: mod_base = OTHER; note = 2'-O-methyl modified nucleotide
  modified_base 11: mod_base = OTHER; note = 2'-O-methyl modified nucleotide
  modified_base 13: mod_base = OTHER; note = 2'-O-methyl modified nucleotide
  modified_base 14: mod_base = OTHER; note = 2'-O-methyl modified nucleotide
  modified_base 15: mod_base = OTHER; note = 2'-O-methyl modified nucleotide
  modified_base 17: mod_base = OTHER; note = 2'-O-methyl modified nucleotide
  modified_base 18: mod_base = OTHER; note = 2'-O-methyl modified nucleotide
  modified_base 19: mod_base = OTHER; note = 2'-O-methyl modified nucleotide
  modified_base 20: mod_base = OTHER; note = 2'-O-methyl modified nucleotide
  modified_base 22: mod_base = OTHER; note = 2'-O-methyl modified nucleotide
  modified_base 23: mod_base = OTHER; note = 2'-O-methyl modified nucleotide
  modified_base 24: mod_base = OTHER; note = 2'-O-methyl modified nucleotide
  modified_base 29: mod_base = OTHER; note = 2'-O-methyl modified nucleotide
  modified_base 30: mod_base = OTHER; note = 2'-O-methyl modified nucleotide
  modified_base 31: mod_base = OTHER; note = 2'-O-methyl modified nucleotide
  modified_base 33: mod_base = OTHER; note = 2'-O-methyl modified nucleotide
  modified_base 35: mod_base = OTHER; note = 2'-O-methyl modified nucleotide
  modified_base 36: mod_base = OTHER; note = 2'-O-methyl modified nucleotide
  modified_base 39: mod_base = OTHER; note = Nucleotide with phosphorothioate linkage
  modified_base 40: mod_base = OTHER; note = 2'-O-methyl modified nucleotide with phosphorothioate linkage
  modified_base 41: mod_base = OTHER; note = 2'-O-methyl modified nucleotide

SEQ ID NO: 217 - RNA, 41 nt, synthetic construct; identical to SEQ ID NO: 200
  source 1..41: mol_type = other RNA
  modified_base 1: mod_base = OTHER; note = 2'-O-methyl modified nucleotide with phosphorothioate linkage
  modified_base 2: mod_base = OTHER; note = 2'-O-methyl modified nucleotide with phosphorothioate linkage
  modified_base 6: mod_base = OTHER; note = 2'-O-methyl modified nucleotide
  modified_base 7: mod_base = OTHER; note = 2'-O-methyl modified nucleotide
  modified_base 10: mod_base = OTHER; note = 2'-O-methyl modified nucleotide
  modified_base 11: mod_base = OTHER; note = 2'-O-methyl modified nucleotide
  modified_base 13: mod_base = OTHER; note = 2'-O-methyl modified nucleotide
  modified_base 14: mod_base = OTHER; note = 2'-O-methyl modified nucleotide
  modified_base 15: mod_base = OTHER; note = 2'-O-methyl modified nucleotide
  modified_base 17: mod_base = OTHER; note = 2'-O-methyl modified nucleotide
  modified_base 18: mod_base = OTHER; note = 2'-O-methyl modified nucleotide
  modified_base 19: mod_base = OTHER; note = 2'-O-methyl modified nucleotide
  modified_base 20: mod_base = OTHER; note = 2'-O-methyl modified nucleotide
  modified_base 22: mod_base = OTHER; note = 2'-O-methyl modified nucleotide
  modified_base 29: mod_base = OTHER; note = 2'-O-methyl modified nucleotide
  modified_base 30: mod_base = OTHER; note = 2'-O-methyl modified nucleotide
  modified_base 31: mod_base = OTHER; note = 2'-O-methyl modified nucleotide
  modified_base 33: mod_base = OTHER; note = 2'-O-methyl modified nucleotide
  modified_base 39: mod_base = OTHER; note = Nucleotide with phosphorothioate linkage
  modified_base 40: mod_base = OTHER; note = 2'-O-methyl modified nucleotide with phosphorothioate linkage
  modified_base 41: mod_base = OTHER; note = 2'-O-methyl modified nucleotide

SEQ ID NO: 218 - RNA, 43 nt, synthetic construct
  source 1..43: mol_type = other RNA
  modified_base 1: mod_base = OTHER; note = 2'-O-methyl modified nucleotide with phosphorothioate linkage
  modified_base 2: mod_base = OTHER; note = 2'-O-methyl modified nucleotide with phosphorothioate linkage
  modified_base 8: mod_base = OTHER; note = 2'-O-methyl modified nucleotide
  modified_base 9: mod_base = OTHER; note = 2'-O-methyl modified nucleotide
  modified_base 13: mod_base = OTHER; note = 2'-O-methyl modified nucleotide
  modified_base 15: mod_base = OTHER; note = 2'-O-methyl modified nucleotide
  modified_base 16: mod_base = OTHER; note = 2'-O-methyl modified nucleotide
  modified_base 17: mod_base = OTHER; note = 2'-O-methyl modified nucleotide
  modified_base 20: mod_base = OTHER; note = 2'-O-methyl modified nucleotide
  modified_base 21: mod_base = OTHER; note = 2'-O-methyl modified nucleotide
  modified_base 22: mod_base = OTHER; note = 2'-O-methyl modified nucleotide
  modified_base 24: mod_base = OTHER; note = 2'-O-methyl modified nucleotide
  modified_base 31: mod_base = OTHER; note = 2'-O-methyl modified nucleotide
  modified_base 32: mod_base = OTHER; note = 2'-O-methyl modified nucleotide
  modified_base 33: mod_base = OTHER; note = 2'-O-methyl modified nucleotide
  modified_base 35: mod_base = OTHER; note = 2'-O-methyl modified nucleotide
  modified_base 41: mod_base = OTHER; note = Nucleotide with phosphorothioate linkage
  modified_base 42: mod_base = OTHER; note = 2'-O-methyl modified nucleotide with phosphorothioate linkage
  modified_base 43: mod_base = OTHER; note = 2'-O-methyl modified nucleotide
ttttaatttctactgttgtagatagtgggggtgaattcagtgt

SEQ ID NO: 219 - RNA, 11 nt, synthetic construct
  source 1..11: mol_type = other RNA
aaaagcaccga

SEQ ID NO: 220 - RNA, 100 nt, synthetic construct
  source 1..100: mol_type = other RNA
tataaacaatcgtcatcctcgttttagagctagaaatagcaagttaaaataaggctagtccgttatcaacttgaaaaagtggcaccgagtcggtgctttt

SEQ ID NO: 221 - RNA, 100 nt, synthetic construct
  source 1..100: mol_type = other RNA
ggataccaacccgcggggtcgttttagagctagaaatagcaagttaaaataaggctagtccgttatcaacttgaaaaagtggcaccgagtcggtgctttt

SEQ ID NO: 222 - RNA, 100 nt, synthetic construct
  source 1..100: mol_type = other RNA
tgtttatcaacgtcatctaggttttagagctagaaatagcaagttaaaataaggctagtccgttatcaacttgaaaaagtggcaccgagtcggtgctttt

SEQ ID NO: 223 - RNA, 100 nt, synthetic construct
  source 1..100: mol_type = other RNA
atctacttagaaagcgaacagttttagagctagaaatagcaagttaaaataaggctagtccgttatcaacttgaaaaagtggcaccgagtcggtgctttt

SEQ ID NO: 224 - RNA, 100 nt, synthetic construct
  source 1..100: mol_type = other RNA
ttgcttttatcacaggctccgttttagagctagaaatagcaagttaaaataaggctagtccgttatcaacttgaaaaagtggcaccgagtcggtgctttt

SEQ ID NO: 225 - RNA, 100 nt, synthetic construct; identical to SEQ ID NO: 49
  source 1..100: mol_type = other RNA

SEQ ID NO: 226 - RNA, 100 nt, synthetic construct
  source 1..100: mol_type = other RNA
gtctcggtggtggactaaacgttttagagctagaaatagcaagttaaaataaggctagtccgttatcaacttgaaaaagtggcaccgagtcggtgctttt

SEQ ID NO: 227 - RNA, 100 nt, synthetic construct
  source 1..100: mol_type = other RNA
ctgaagggataccaacccgcgttttagagctagaaatagcaagttaaaataaggctagtccgttatcaacttgaaaaagtggcaccgagtcggtgctttt

SEQ ID NO: 228 - RNA, 100 nt, synthetic construct
  source 1..100: mol_type = other RNA
tgaaccagaccacggcccgtgttttagagctagaaatagcaagttaaaataaggctagtccgttatcaacttgaaaaagtggcaccgagtcggtgctttt

SEQ ID NO: 229 - RNA, 100 nt, synthetic construct
  source 1..100: mol_type = other RNA
atcacccgagtgcctttgacgttttagagctagaaatagcaagttaaaataaggctagtccgttatcaacttgaaaaagtggcaccgagtcggtgctttt

SEQ ID NO: 230 - RNA, 41 nt, synthetic construct
  source 1..41: mol_type = other RNA
taatttctactaagtgtagatctggagcctgtgataaaagc

SEQ ID NO: 231 - RNA, 41 nt, synthetic construct
  source 1..41: mol_type = other RNA
taatttctactaagtgtagatccttgtcaaggctattggtc

SEQ ID NO: 232 - RNA, 41 nt, synthetic construct
  source 1..41: mol_type = other RNA
taatttctactaagtgtagatcattgagatagtgtggggaa

SEQ ID NO: 233 - RNA, 100 nt, synthetic construct
  source 1..100: mol_type = other RNA
cttgtcaaggctattggtcagttttagagctagaaatagcaagttaaaataaggctagtccgttatcaacttgaaaaagtggcaccgagtcggtgctttt

SEQ ID NO: 234 - RNA, 100 nt, synthetic construct
  source 1..100: mol_type = other RNA
attgagatagtgtggggaaggttttagagctagaaatagcaagttaaaataaggctagtccgttatcaacttgaaaaagtggcaccgagtcggtgctttt

SEQ ID NO: 235 - RNA, 100 nt, synthetic construct
  source 1..100: mol_type = other RNA
cttgaccaatagccttgacagttttagagctagaaatagcaagttaaaataaggctagtccgttatcaacttgaaaaagtggcaccgagtcggtgctttt

SEQ ID NO: 236 - RNA, 100 nt, synthetic construct
  source 1..100: mol_type = other RNA
gtggggaaggggcccccaaggttttagagctagaaatagcaagttaaaataaggctagtccgttatcaacttgaaaaagtggcaccgagtcggtgctttt

SEQ ID NO: 237 - RNA, 100 nt, synthetic construct
  source 1..100: mol_type = other RNA
caaggctattggtcaaggcagttttagagctagaaatagcaagttaaaataaggctagtccgttatcaacttgaaaaagtggcaccgagtcggtgctttt

SEQ ID NO: 238 - RNA, 99 nt, synthetic construct
  source 1..99: mol_type = other RNA
cttgtcaaggctattggtcgttttagagctagaaatagcaagttaaaataaggctagtccgttatcaacttgaaaaagtggcaccgagtcggtgctttt

SEQ ID NO: 239 - RNA, 100 nt, synthetic construct
  source 1..100: mol_type = other RNA
tagccttgacaaggcaaactgttttagagctagaaatagcaagttaaaataaggctagtccgttatcaacttgaaaaagtggcaccgagtcggtgctttt

SEQ ID NO: 240 - RNA, 100 nt, synthetic construct
  source 1..100: mol_type = other RNA
tatctgtctgaaacggtcccgttttagagctagaaatagcaagttaaaataaggctagtccgttatcaacttgaaaaagtggcaccgagtcggtgctttt

SEQ ID NO: 241 - RNA, 99 nt, synthetic construct
  source 1..99: mol_type = other RNA
gtggggaaggggcccccaagttttagagctagaaatagcaagttaaaataaggctagtccgttatcaacttgaaaaagtggcaccgagtcggtgctttt

SEQ ID NO: 242 - RNA, 100 nt, synthetic construct
  source 1..100: mol_type = other RNA
agatatttgcattgagataggttttagagctagaaatagcaagttaaaataaggctagtccgttatcaacttgaaaaagtggcaccgagtcggtgctttt

SEQ ID NO: 243 - RNA, 100 nt, synthetic construct
  source 1..100: mol_type = other RNA
ggcaaggctggccaacccatgttttagagctagaaatagcaagttaaaataaggctagtccgttatcaacttgaaaaagtggcaccgagtcggtgctttt

SEQ ID NO: 244 - RNA, 100 nt, synthetic construct
  source 1..100: mol_type = other RNA
aggcaaggctggccaacccagttttagagctagaaatagcaagttaaaataaggctagtccgttatcaacttgaaaaagtggcaccgagtcggtgctttt

SEQ ID NO: 245 - RNA, 42 nt, synthetic construct
  source 1..42: mol_type = other RNA
taatttctactaagtgtagatccttgtcaaggctattggtca

SEQ ID NO: 246 - RNA, 43 nt, synthetic construct
  source 1..43: mol_type = other RNA
taatttctactaagtgtagatccttgtcaaggctattggtcaa

SEQ ID NO: 247 - RNA, 44 nt, synthetic construct
  source 1..44: mol_type = other RNA
taatttctactaagtgtagatccttgtcaaggctattggtcaag

SEQ ID NO: 248 - RNA, 44 nt, synthetic construct
  source 1..44: mol_type = other RNA
tgaatttctactgttgtagatccttgtcaaggctattggtcaag

SEQ ID NO: 249 - RNA, 44 nt, synthetic construct
  source 1..44: mol_type = other RNA
ataatttctactgttgtagatccttgtcaaggctattggtcaag

SEQ ID NO: 250 - RNA, 44 nt, synthetic construct
  source 1..44: mol_type = other RNA
taaatttctactattgtagatccttgtcaaggctattggtcaag

SEQ ID NO: 251 - RNA, 44 nt, synthetic construct
  source 1..44: mol_type = other RNA
taatttctactaagtgtagatcattgagatagtgtggggaaggg

SEQ ID NO: 252 - RNA, 44 nt, synthetic construct
  source 1..44: mol_type = other RNA
tgaatttctactgttgtagatcattgagatagtgtggggaaggg

SEQ ID NO: 253 - RNA, 44 nt, synthetic construct
  source 1..44: mol_type = other RNA
ataatttctactgttgtagatcattgagatagtgtggggaaggg

SEQ ID NO: 254 - RNA, 44 nt, synthetic construct
  source 1..44: mol_type = other RNA
taaatttctactattgtagatcattgagatagtgtggggaaggg

SEQ ID NO: 255 - RNA, 40 nt, synthetic construct
  source 1..40: mol_type = other RNA
taatttctactcttgtagatccttgtcaaggctattggtc

SEQ ID NO: 256 - RNA, 41 nt, synthetic construct
  source 1..41: mol_type = other RNA
taatttctactcttgtagatccttgtcaaggctattggtca

SEQ ID NO: 257 - RNA, 42 nt, synthetic construct
  source 1..42: mol_type = other RNA
taatttctactcttgtagatccttgtcaaggctattggtcaa

SEQ ID NO: 258 - RNA, 43 nt, synthetic construct
  source 1..43: mol_type = other RNA
taatttctactcttgtagatccttgtcaaggctattggtcaag

SEQ ID NO: 259 - RNA, 43 nt, synthetic construct
  source 1..43: mol_type = other RNA
taatttctactcttgtagatcattgagatagtgtggggaaggg

SEQ ID NO: 260 - RNA, 42 nt, synthetic construct
  source 1..42: mol_type = other RNA
  modified_base 20: mod_base = OTHER; note = 2'-O-methyl modified nucleotide
  modified_base 21: mod_base = OTHER; note = 2'-O-methyl modified nucleotide
  modified_base 22: mod_base = OTHER; note = 2'-O-methyl modified nucleotide
  modified_base 23: mod_base = OTHER; note = 2'-O-methyl modified nucleotide
  modified_base 24: mod_base = OTHER; note = 2'-O-methyl modified nucleotide
  modified_base 25: mod_base = OTHER; note = 2'-O-methyl modified nucleotide
  modified_base 26: mod_base = OTHER; note = 2'-O-methyl modified nucleotide
  modified_base 27: mod_base = OTHER; note = 2'-O-methyl modified nucleotide
  modified_base 28: mod_base = OTHER; note = 2'-O-methyl modified nucleotide
  modified_base 29: mod_base = OTHER; note = 2'-O-methyl modified nucleotide
  modified_base 30: mod_base = OTHER; note = 2'-O-methyl modified nucleotide
  modified_base 31: mod_base = OTHER; note = 2'-O-methyl modified nucleotide
  modified_base 32: mod_base = OTHER; note = 2'-O-methyl modified nucleotide
  modified_base 33: mod_base = OTHER; note = 2'-O-methyl modified nucleotide
  modified_base 34: mod_base = OTHER; note = 2'-O-methyl modified nucleotide
  modified_base 35: mod_base = OTHER; note = 2'-O-methyl modified nucleotide
  modified_base 36: mod_base = OTHER; note = 2'-O-methyl modified nucleotide
  modified_base 37: mod_base = OTHER; note = 2'-O-methyl modified nucleotide
  modified_base 38: mod_base = OTHER; note = 2'-O-methyl modified nucleotide
  modified_base 39: mod_base = OTHER; note = 2'-O-methyl modified nucleotide
  modified_base 40: mod_base = OTHER; note = 2'-O-methyl modified nucleotide
  modified_base 41: mod_base = OTHER; note = 2'-O-methyl modified nucleotide
  modified_base 42: mod_base = OTHER; note = 2'-O-methyl modified nucleotide
aatttctactgttgtagatccttgtcaaggctattggtcaag

SEQ ID NO: 261 - RNA, 42 nt, synthetic construct
  source 1..42: mol_type = other RNA
  modified_base 20: mod_base = OTHER; note = 2'-O-methyl modified nucleotide
  modified_base 21: mod_base = OTHER; note = 2'-O-methyl modified nucleotide
  modified_base 22: mod_base = OTHER; note = 2'-O-methyl modified nucleotide
  modified_base 23: mod_base = OTHER; note = 2'-O-methyl modified nucleotide
  modified_base 24: mod_base = OTHER; note = 2'-O-methyl modified nucleotide
  modified_base 25: mod_base = OTHER; note = 2'-O-methyl modified nucleotide
  modified_base 26: mod_base = OTHER; note = 2'-O-methyl modified nucleotide
  modified_base 27: mod_base = OTHER; note = 2'-O-methyl modified nucleotide
  modified_base 28: mod_base = OTHER; note = 2'-O-methyl modified nucleotide
  modified_base 29: mod_base = OTHER; note = 2'-O-methyl modified nucleotide
  modified_base 30: mod_base = OTHER; note = 2'-O-methyl modified nucleotide
  modified_base 31: mod_base = OTHER; note = 2'-O-methyl modified nucleotide
  modified_base 32: mod_base = OTHER; note = 2'-O-methyl modified nucleotide
  modified_base 33: mod_base = OTHER; note = 2'-O-methyl modified nucleotide
  modified_base 34: mod_base = OTHER; note = 2'-O-methyl modified nucleotide
  modified_base 35: mod_base = OTHER; note = 2'-O-methyl modified nucleotide
  modified_base 36: mod_base = OTHER; note = 2'-O-methyl modified nucleotide
  modified_base 37: mod_base = OTHER; note = 2'-O-methyl modified nucleotide
  modified_base 38: mod_base = OTHER; note = 2'-O-methyl modified nucleotide
  modified_base 39: mod_base = OTHER; note = 2'-O-methyl modified nucleotide
  modified_base 40: mod_base = OTHER; note = 2'-O-methyl modified nucleotide
  modified_base 41: mod_base = OTHER; note = 2'-O-methyl modified nucleotide
  modified_base 42: mod_base = OTHER; note = 2'-O-methyl modified nucleotide
aatttctacttcggtagatccttgtcaaggctattggtcaag

SEQ ID NO: 262 - RNA, 42 nt, synthetic construct
  source 1..42: mol_type = other RNA
  modified_base 20: mod_base = OTHER; note = 2'-O-methyl modified nucleotide
  modified_base 21: mod_base = OTHER; note = 2'-O-methyl modified nucleotide
  modified_base 22: mod_base = OTHER; note = 2'-O-methyl modified nucleotide
  modified_base 23: mod_base = OTHER; note = 2'-O-methyl modified nucleotide
  modified_base 24: mod_base = OTHER; note = 2'-O-methyl modified nucleotide
  modified_base 25: mod_base = OTHER; note = 2'-O-methyl modified nucleotide
  modified_base 26: mod_base = OTHER; note = 2'-O-methyl modified nucleotide
  modified_base 27: mod_base = OTHER; note = 2'-O-methyl modified nucleotide
  modified_base 28: mod_base = OTHER; note = 2'-O-methyl modified nucleotide
  modified_base 29: mod_base = OTHER; note = 2'-O-methyl modified nucleotide
  modified_base 30: mod_base = OTHER; note = 2'-O-methyl modified nucleotide
  modified_base 31: mod_base = OTHER; note = 2'-O-methyl modified nucleotide
  modified_base 32: mod_base = OTHER; note = 2'-O-methyl modified nucleotide
  modified_base 33: mod_base = OTHER; note = 2'-O-methyl modified nucleotide
  modified_base 34: mod_base = OTHER; note = 2'-O-methyl modified nucleotide
  modified_base 35: mod_base = OTHER; note = 2'-O-methyl modified nucleotide
  modified_base 36: mod_base = OTHER; note = 2'-O-methyl modified nucleotide
  modified_base 37: mod_base = OTHER; note = 2'-O-methyl modified nucleotide
  modified_base 38: mod_base = OTHER; note = 2'-O-methyl modified nucleotide
  modified_base 39: mod_base = OTHER; note = 2'-O-methyl modified nucleotide
  modified_base 40: mod_base = OTHER; note = 2'-O-methyl modified nucleotide
  modified_base 41: mod_base = OTHER; note = 2'-O-methyl modified nucleotide
  modified_base 42: mod_base = OTHER; note = 2'-O-methyl modified nucleotide
aatttctactattgtagatccttgtcaaggctattggtcaag

SEQ ID NO: 263 - RNA, 40 nt, synthetic construct
  source 1..40: mol_type = other RNA
taatttctactcttgtagatcccaggggggcctctttcgg

SEQ ID NO: 264 - RNA, 40 nt, synthetic construct
  source 1..40: mol_type = other RNA
taatttctactcttgtagattcacaggctccaggaagggt

SEQ ID NO: 265 - RNA, 40 nt, synthetic construct
  source 1..40: mol_type = other RNA
taatttctactcttgtagataagctagtctagtgcaagct

SEQ ID NO: 266 - RNA, 40 nt, synthetic construct
  source 1..40: mol_type = other RNA
taatttctactcttgtagatcactggaatcagctatctgc

SEQ ID NO: 267 - RNA, 40 nt, synthetic construct
  source 1..40: mol_type = other RNA
taatttctactcttgtagatagccatctcactacagataa

SEQ ID NO: 268 - RNA, 40 nt, synthetic construct
  source 1..40: mol_type = other RNA
taatttctactcttgtagatcccatggggcacagtcaggc

SEQ ID NO: 269 - RNA, 100 nt, synthetic construct
  source 1..100: mol_type = other RNA
ttttatcacaggctccaggagttttagagctagaaatagcaagttaaaataaggctagtccgttatcaacttgaaaaagtggcaccgagtcggtgctttt

SEQ ID NO: 270 - RNA, 100 nt, synthetic construct
  source 1..100: mol_type = other RNA
tttatcacaggctccaggaagttttagagctagaaatagcaagttaaaataaggctagtccgttatcaacttgaaaaagtggcaccgagtcggtgctttt

SEQ ID NO: 271 - RNA, 100 nt, synthetic construct
  source 1..100: mol_type = other RNA
actgaatcggaacaaggcaagttttagagctagaaatagcaagttaaaataaggctagtccgttatcaacttgaaaaagtggcaccgagtcggtgctttt

SEQ ID NO: 272 - RNA, 100 nt, synthetic construct
  source 1..100: mol_type = other RNA
gataaacaatcgtcatcctcgttttagagctagaaatagcaagttaaaataaggctagtccgttatcaacttgaaaaagtggcaccgagtcggtgctttt

SEQ ID NO: 273 - RNA, 100 nt, synthetic construct; identical to SEQ ID NO: 221
  source 1..100: mol_type = other RNA

SEQ ID NO: 274 - RNA, 100 nt, synthetic construct; identical to SEQ ID NO: 222
  source 1..100: mol_type = other RNA

SEQ ID NO: 275 - RNA, 100 nt, synthetic construct; identical to SEQ ID NO: 223
  source 1..100: mol_type = other RNA

SEQ ID NO: 276 - RNA, 100 nt, synthetic construct; identical to SEQ ID NO: 224
  source 1..100: mol_type = other RNA

SEQ ID NO: 277 - RNA, 100 nt, synthetic construct; identical to SEQ ID NO: 49
  source 1..100: mol_type = other RNA

SEQ ID NO: 278 - RNA, 100 nt, synthetic construct; identical to SEQ ID NO: 226
  source 1..100: mol_type = other RNA

SEQ ID NO: 279 - RNA, 100 nt, synthetic construct; identical to SEQ ID NO: 227
  source 1..100: mol_type = other RNA

SEQ ID NO: 280 - RNA, 100 nt, synthetic construct; identical to SEQ ID NO: 228
  source 1..100: mol_type = other RNA

SEQ ID NO: 281 - RNA, 100 nt, synthetic construct; identical to SEQ ID NO: 229
  source 1..100: mol_type = other RNA

SEQ ID NO: 282 - RNA, 100 nt, synthetic construct; identical to SEQ ID NO: 235
  source 1..100: mol_type = other RNA

SEQ ID NO: 283 - RNA, 100 nt, synthetic construct; identical to SEQ ID NO: 236
  source 1..100: mol_type = other RNA

SEQ ID NO: 284 - RNA, 100 nt, synthetic construct; identical to SEQ ID NO: 235
  source 1..100: mol_type = other RNA

SEQ ID NO: 285 - RNA, 100 nt, synthetic construct; identical to SEQ ID NO: 236
  source 1..100: mol_type = other RNA

SEQ ID NO: 286 - RNA, 100 nt, synthetic construct; identical to SEQ ID NO: 237
  source 1..100: mol_type = other RNA

SEQ ID NO: 287 - RNA, 99 nt, synthetic construct; identical to SEQ ID NO: 238
  source 1..99: mol_type = other RNA

SEQ ID NO: 288 - RNA, 100 nt, synthetic construct; identical to SEQ ID NO: 239
  source 1..100: mol_type = other RNA

SEQ ID NO: 289 - RNA, 100 nt, synthetic construct; identical to SEQ ID NO: 240
  source 1..100: mol_type = other RNA

SEQ ID NO: 290 - RNA, 42 nt, synthetic construct; identical to SEQ ID NO: 207
  source 1..42: mol_type = other RNA

SEQ ID NO: 291 - RNA, 42 nt, synthetic construct
  source 1..42: mol_type = other RNA
ataatttctactgttgtagatccttgtcaaggctattggtca

SEQ ID NO: 292 - RNA, 42 nt, synthetic construct
  source 1..42: mol_type = other RNA
taaatttctactattgtagatccttgtcaaggctattggtca

SEQ ID NO: 293 - RNA, 40 nt, synthetic construct
  source 1..40: mol_type = other RNA
aatttctactgttgtagatccttgtcaaggctattggtca

SEQ ID NO: 294 - RNA, 40 nt, synthetic construct
  source 1..40: mol_type = other RNA
aatttctacttcggtagatccttgtcaaggctattggtca

SEQ ID NO: 295 - RNA, 40 nt, synthetic construct
  source 1..40: mol_type = other RNA
aatttctactattgtagatccttgtcaaggctattggtca

SEQ ID NO: 296 - RNA, 100 nt, synthetic construct; identical to SEQ ID NO: 271
  source 1..100: mol_type = other RNA

SEQ ID NO: 297 - RNA, 100 nt, synthetic construct; identical to SEQ ID NO: 233
  source 1..100: mol_type = other RNA

SEQ ID NO: 298 - DNA, 20 bp, synthetic construct
  source 1..20: mol_type = other DNA
ctaacagttgcttttatcac

SEQ ID NO: 299 - RNA, 42 nt, synthetic construct; identical to SEQ ID NO: 207
  source 1..42: mol_type = other RNA
  modified_base 1: mod_base = OTHER; note = 2'-O-methyl modified nucleotide
  modified_base 2: mod_base = OTHER; note = 2'-O-methyl modified nucleotide
  modified_base 3: mod_base = OTHER; note = 2'-O-methyl modified nucleotide
  modified_base 4: mod_base = OTHER; note = 2'-O-methyl modified nucleotide
  modified_base 5: mod_base = OTHER; note = 2'-O-methyl modified nucleotide
  modified_base 6: mod_base = OTHER; note = 2'-O-methyl modified nucleotide
  modified_base 7: mod_base = OTHER; note = 2'-O-methyl modified nucleotide
  modified_base 8: mod_base = OTHER; note = 2'-O-methyl modified nucleotide
  modified_base 9: mod_base = OTHER; note = 2'-O-methyl modified nucleotide
  modified_base 10: mod_base = OTHER; note = 2'-O-methyl modified nucleotide
  modified_base 11: mod_base = OTHER; note = 2'-O-methyl modified nucleotide
  modified_base 12: mod_base = OTHER; note = 2'-O-methyl modified nucleotide
  modified_base 13: mod_base = OTHER; note = 2'-O-methyl modified nucleotide
  modified_base 14: mod_base = OTHER; note = 2'-O-methyl modified nucleotide
  modified_base 15: mod_base = OTHER; note = 2'-O-methyl modified nucleotide
  modified_base 16: mod_base = OTHER; note = 2'-O-methyl modified nucleotide
  modified_base 17: mod_base = OTHER; note = 2'-O-methyl modified nucleotide
  modified_base 18: mod_base = OTHER; note = 2'-O-methyl modified nucleotide
  modified_base 19: mod_base = OTHER; note = 2'-O-methyl modified nucleotide
  modified_base 20: mod_base = OTHER; note = 2'-O-methyl modified nucleotide
  modified_base 21: mod_base = OTHER; note = 2'-O-methyl modified nucleotide
  modified_base 22: mod_base = OTHER; note = 2'-O-methyl modified nucleotide
  modified_base 23: mod_base = OTHER; note = 2'-O-methyl modified nucleotide
  modified_base 24: mod_base = OTHER; note = 2'-O-methyl modified nucleotide
  modified_base 25: mod_base = OTHER; note = 2'-O-methyl modified nucleotide
  modified_base 26: mod_base = OTHER; note = 2'-O-methyl modified nucleotide
  modified_base 27: mod_base = OTHER; note = 2'-O-methyl modified nucleotide
  modified_base 28: mod_base = OTHER; note = 2'-O-methyl modified nucleotide
  modified_base 29: mod_base = OTHER; note = 2'-O-methyl modified nucleotide
  modified_base 30: mod_base = OTHER; note = 2'-O-methyl modified nucleotide
  modified_base 31: mod_base = OTHER; note = 2'-O-methyl modified nucleotide
  modified_base 32: mod_base = OTHER; note = 2'-O-methyl modified nucleotide
  modified_base 33: mod_base = OTHER; note = 2'-O-methyl modified nucleotide
  modified_base 34: mod_base = OTHER; note = 2'-O-methyl modified nucleotide
  modified_base 35: mod_base = OTHER; note = 2'-O-methyl modified nucleotide
  modified_base 36: mod_base = OTHER; note = 2'-O-methyl modified nucleotide
  modified_base 37: mod_base = OTHER; note = 2'-O-methyl modified nucleotide
  modified_base 38: mod_base = OTHER; note = 2'-O-methyl modified nucleotide
  modified_base 39: mod_base = OTHER; note = 2'-O-methyl modified nucleotide
  modified_base 40: mod_base = OTHER; note = 2'-O-methyl modified nucleotide
  modified_base 41: mod_base = OTHER; note = 2'-O-methyl modified nucleotide
  modified_base 42: mod_base = OTHER; note = 2'-O-methyl modified nucleotide

SEQ ID NO: 300 - RNA, 42 nt, synthetic construct; identical to SEQ ID NO: 207
  source 1..42: mol_type = other RNA
  modified_base 1: mod_base = OTHER; note = 2'-O-methyl modified nucleotide
  modified_base 2: mod_base = OTHER; note = 2'-O-methyl modified nucleotide
  modified_base 3: mod_base = OTHER; note = 2'-O-methyl modified nucleotide
  modified_base 4: mod_base = OTHER; note = 2'-O-methyl modified nucleotide
  modified_base 5: mod_base = OTHER; note = 2'-O-methyl modified nucleotide
  modified_base 6: mod_base = OTHER; note = 2'-O-methyl modified nucleotide
  modified_base 7: mod_base = OTHER; note = 2'-O-methyl modified nucleotide
  modified_base 8: mod_base = OTHER; note = 2'-O-methyl modified nucleotide
  modified_base 9: mod_base = OTHER; note = 2'-O-methyl modified nucleotide
  modified_base 10: mod_base = OTHER; note = 2'-O-methyl modified nucleotide
  modified_base 11: mod_base = OTHER; note = 2'-O-methyl modified nucleotide
  modified_base 12: mod_base = OTHER; note = 2'-O-methyl modified nucleotide
  modified_base 13: mod_base = OTHER; note = 2'-O-methyl modified nucleotide
  modified_base 14: mod_base = OTHER; note = 2'-O-methyl modified nucleotide
  modified_base 15: mod_base = OTHER; note = 2'-O-methyl modified nucleotide
  modified_base 16: mod_base = OTHER; note = 2'-O-methyl modified nucleotide
  modified_base 17: mod_base = OTHER; note = 2'-O-methyl modified nucleotide
  modified_base 18: mod_base = OTHER; note = 2'-O-methyl modified nucleotide
  modified_base 19: mod_base = OTHER; note = 2'-O-methyl modified nucleotide
  modified_base 20: mod_base = OTHER; note = 2'-O-methyl modified nucleotide
  modified_base 21: mod_base = OTHER; note = 2'-O-methyl modified nucleotide
  modified_base 22: mod_base = OTHER; note = 2'-O-methyl modified nucleotide
  modified_base 23: mod_base = OTHER; note = 2'-O-methyl modified nucleotide
  modified_base 24: mod_base = OTHER; note = 2'-O-methyl modified nucleotide
  modified_base 28: mod_base = OTHER; note = 2'-O-methyl modified nucleotide
  modified_base 29: mod_base = OTHER; note = 2'-O-methyl modified nucleotide
  modified_base 30: mod_base = OTHER; note = 2'-O-methyl modified nucleotide
  modified_base 31: mod_base = OTHER; note = 2'-O-methyl modified nucleotide
  modified_base 32: mod_base = OTHER; note = 2'-O-methyl modified nucleotide
  modified_base 33: mod_base = OTHER; note = 2'-O-methyl modified nucleotide
  modified_base 35: mod_base = OTHER; note = 2'-O-methyl modified nucleotide
  modified_base 36: mod_base = OTHER; note = 2'-O-methyl modified nucleotide
  modified_base 38: mod_base = OTHER; note = 2'-O-methyl modified nucleotide
  modified_base 39: mod_base = OTHER; note = 2'-O-methyl modified nucleotide
  modified_base 40: mod_base = OTHER; note = 2'-O-methyl modified nucleotide
  modified_base 41: mod_base = OTHER; note = 2'-O-methyl modified nucleotide
  modified_base 42: mod_base = OTHER; note = 2'-O-methyl modified nucleotide

SEQ ID NO: 301 - RNA, 42 nt, synthetic construct; identical to SEQ ID NO: 207
  source 1..42: mol_type = other RNA
  modified_base 1: mod_base = OTHER; note = 2'-O-methyl modified nucleotide
  modified_base 2: mod_base = OTHER; note = 2'-O-methyl modified nucleotide
  modified_base 6: mod_base = OTHER; note = 2'-O-methyl modified nucleotide
  modified_base 7: mod_base = OTHER; note = 2'-O-methyl modified nucleotide
  modified_base 8: mod_base = OTHER; note = 2'-O-methyl modified nucleotide
  modified_base 9: mod_base = OTHER; note = 2'-O-methyl modified nucleotide
  modified_base 10: mod_base = OTHER; note = 2'-O-methyl modified nucleotide
  modified_base 11: mod_base = OTHER; note = 2'-O-methyl modified nucleotide
  modified_base 13: mod_base = OTHER; note = 2'-O-methyl modified nucleotide
  modified_base 14: mod_base = OTHER; note = 2'-O-methyl modified nucleotide
  modified_base 15: mod_base = OTHER; note = 2'-O-methyl modified nucleotide
  modified_base 17: mod_base = OTHER; note = 2'-O-methyl modified nucleotide
  modified_base 18: mod_base = OTHER; note = 2'-O-methyl modified nucleotide
  modified_base 19: mod_base = OTHER; note = 2'-O-methyl modified nucleotide
  modified_base 20: mod_base = OTHER; note = 2'-O-methyl modified nucleotide
  modified_base 22: mod_base = OTHER; note = 2'-O-methyl modified nucleotide
  modified_base 23: mod_base = OTHER; note = 2'-O-methyl modified nucleotide
  modified_base 24: mod_base = OTHER; note = 2'-O-methyl modified nucleotide
  modified_base 25: mod_base = OTHER; note = 2'-O-methyl modified nucleotide
  modified_base 26: mod_base = OTHER; note = 2'-O-methyl modified nucleotide
  modified_base 27: mod_base = OTHER; note = 2'-O-methyl modified nucleotide
  modified_base 28: mod_base = OTHER; note = 2'-O-methyl modified nucleotide
  modified_base 29: mod_base = OTHER; note = 2'-O-methyl modified nucleotide
  modified_base 30: mod_base = OTHER; note = 2'-O-methyl modified nucleotide
  modified_base 31: mod_base = OTHER; note = 2'-O-methyl modified nucleotide
  modified_base 32: mod_base = OTHER; note = 2'-O-methyl modified nucleotide
  modified_base 33: mod_base = OTHER; note = 2'-O-methyl modified nucleotide
  modified_base 34: mod_base = OTHER; note = 2'-O-methyl modified nucleotide
  modified_base 35: mod_base = OTHER; note = 2'-O-methyl modified nucleotide
  modified_base 36: mod_base = OTHER; note = 2'-O-methyl modified nucleotide
  modified_base 37: mod_base = OTHER; note = 2'-O-methyl modified nucleotide
  modified_base 38: mod_base = OTHER; note = 2'-O-methyl modified nucleotide
  modified_base 39: mod_base = OTHER; note = 2'-O-methyl modified nucleotide
  modified_base 40: mod_base = OTHER; note = 2'-O-methyl modified nucleotide
  modified_base 41: mod_base = OTHER; note = 2'-O-methyl modified nucleotide
  modified_base 42: mod_base = OTHER; note = 2'-O-methyl modified nucleotide

SEQ ID NO: 302 - RNA, 42 nt, synthetic construct; identical to SEQ ID NO: 207
  source 1..42: mol_type = other RNA
  modified_base 1: mod_base = OTHER; note = 2'-O-methyl modified nucleotide
  modified_base 2: mod_base = OTHER; note = 2'-O-methyl modified nucleotide
  modified_base 6: mod_base = OTHER; note = 2'-O-methyl modified nucleotide
  modified_base 7: mod_base = OTHER; note = 2'-O-methyl modified nucleotide
  modified_base 8: mod_base = OTHER; note = 2'-O-methyl modified nucleotide
  modified_base 9: mod_base = OTHER; note = 2'-O-methyl modified nucleotide
  modified_base 10: mod_base = OTHER; note = 2'-O-methyl modified nucleotide
  modified_base 11: mod_base = OTHER; note = 2'-O-methyl modified nucleotide
  modified_base 13: mod_base = OTHER; note = 2'-O-methyl modified nucleotide
  modified_base 14: mod_base = OTHER; note = 2'-O-methyl modified nucleotide
  modified_base 15: mod_base = OTHER; note = 2'-O-methyl modified nucleotide
  modified_base 17: mod_base = OTHER; note = 2'-O-methyl modified nucleotide
  modified_base 18: mod_base = OTHER; note = 2'-O-methyl modified nucleotide
  modified_base 19: mod_base = OTHER; note = 2'-O-methyl modified nucleotide
  modified_base 20: mod_base = OTHER; note = 2'-O-methyl modified nucleotide
  modified_base 22: mod_base = OTHER; note = 2'-O-methyl modified nucleotide
  modified_base 23: mod_base = OTHER; note = 2'-O-methyl modified nucleotide
  modified_base 24: mod_base = OTHER; note = 2'-O-methyl modified nucleotide
  modified_base 28: mod_base = OTHER; note = 2'-O-methyl modified nucleotide
  modified_base 29: mod_base = OTHER; note = 2'-O-methyl modified nucleotide
  modified_base 30: mod_base = OTHER; note = 2'-O-methyl modified nucleotide
  modified_base 31: mod_base = OTHER; note = 2'-O-methyl modified nucleotide
  modified_base 32: mod_base = OTHER; note = 2'-O-methyl modified nucleotide
  modified_base 33: mod_base = OTHER; note = 2'-O-methyl modified nucleotide
  modified_base 35: mod_base = OTHER; note = 2'-O-methyl modified nucleotide
  modified_base 36: mod_base = OTHER; note = 2'-O-methyl modified nucleotide
  modified_base 38: mod_base = OTHER; note = 2'-O-methyl modified nucleotide
  modified_base 39: mod_base = OTHER; note = 2'-O-methyl modified nucleotide
  modified_base 40: mod_base = OTHER; note = 2'-O-methyl modified nucleotide
  modified_base 41: mod_base = OTHER; note = 2'-O-methyl modified nucleotide
  modified_base 42: mod_base = OTHER; note = 2'-O-methyl modified nucleotide

SEQ ID NO: 303 - RNA, 42 nt, synthetic construct; identical to SEQ ID NO: 207
  source 1..42: mol_type = other RNA
  modified_base 1: mod_base = OTHER; note = 2'-O-methyl modified nucleotide
  modified_base 2: mod_base = OTHER; note = 2'-O-methyl modified nucleotide
  modified_base 6: mod_base = OTHER; note = 2'-O-methyl modified nucleotide
  modified_base 7: mod_base = OTHER; note = 2'-O-methyl modified nucleotide
  modified_base 10: mod_base = OTHER; note = 2'-O-methyl modified nucleotide
  modified_base 11: mod_base = OTHER; note = 2'-O-methyl modified nucleotide
  modified_base 13: mod_base = OTHER; note = 2'-O-methyl modified nucleotide
  modified_base 14: mod_base = OTHER; note = 2'-O-methyl modified nucleotide
  modified_base 15: mod_base = OTHER; note = 2'-O-methyl modified nucleotide
  modified_base 17: mod_base = OTHER; note = 2'-O-methyl modified nucleotide
  modified_base 18: mod_base = OTHER; note = 2'-O-methyl modified nucleotide
  modified_base 19: mod_base = OTHER; note = 2'-O-methyl modified nucleotide
  modified_base 20: mod_base = OTHER; note = 2'-O-methyl modified nucleotide
  modified_base 22: mod_base = OTHER; note = 2'-O-methyl modified nucleotide
  modified_base 23: mod_base = OTHER; note = 2'-O-methyl modified nucleotide
  modified_base 24: mod_base = OTHER; note = 2'-O-methyl modified nucleotide
  modified_base 29: mod_base = OTHER; note = 2'-O-methyl modified nucleotide
  modified_base 30: mod_base = OTHER; note = 2'-O-methyl modified nucleotide
  modified_base 31: mod_base = OTHER; note = 2'-O-methyl modified nucleotide
  modified_base 33: mod_base = OTHER; note = 2'-O-methyl modified nucleotide
  modified_base 35: mod_base = OTHER; note = 2'-O-methyl modified nucleotide
  modified_base 36: mod_base = OTHER; note = 2'-O-methyl modified nucleotide
  modified_base 40: mod_base = OTHER; note = 2'-O-methyl modified nucleotide
  modified_base 41: mod_base = OTHER; note = 2'-O-methyl modified nucleotide
  modified_base 42: mod_base = OTHER; note = 2'-O-methyl modified nucleotide

SEQ ID NO: 304 - RNA, 42 nt, synthetic construct; identical to SEQ ID NO: 207
  source 1..42: mol_type = other RNA
  modified_base 1: mod_base = OTHER; note = 2'-O-methyl modified nucleotide
  modified_base 2: mod_base = OTHER; note = 2'-O-methyl modified nucleotide
  modified_base 6: mod_base = OTHER; note = 2'-O-methyl modified nucleotide
  modified_base 7: mod_base = OTHER; note = 2'-O-methyl modified nucleotide
  modified_base 10: mod_base = OTHER; note = 2'-O-methyl modified nucleotide
  modified_base 11: mod_base = OTHER; note = 2'-O-methyl modified nucleotide
  modified_base 13: mod_base = OTHER; note = 2'-O-methyl modified nucleotide
  modified_base 14: mod_base = OTHER; note = 2'-O-methyl modified nucleotide
  modified_base 15: mod_base = OTHER; note = 2'-O-methyl modified nucleotide
  modified_base 17: mod_base = OTHER; note = 2'-O-methyl modified nucleotide
  modified_base 18: mod_base = OTHER; note = 2'-O-methyl modified nucleotide
  modified_base 19: mod_base = OTHER; note = 2'-O-methyl modified nucleotide
  modified_base 20: mod_base = OTHER; note = 2'-O-methyl modified nucleotide
  modified_base 22: mod_base = OTHER; note = 2'-O-methyl modified nucleotide
  modified_base 29: mod_base = OTHER; note = 2'-O-methyl modified nucleotide
  modified_base 30: mod_base = OTHER; note = 2'-O-methyl modified nucleotide
  modified_base 31: mod_base = OTHER; note = 2'-O-methyl modified nucleotide
  modified_base 33: mod_base = OTHER; note = 2'-O-methyl modified nucleotide
  modified_base 40: mod_base = OTHER; note = 2'-O-methyl modified nucleotide
  modified_base 41: mod_base = OTHER; note = 2'-O-methyl modified nucleotide
  modified_base 42: mod_base = OTHER; note = 2'-O-methyl modified nucleotide

SEQ ID NO: 305 - RNA, 44 nt, synthetic construct; identical to SEQ ID NO: 51
  source 1..44: mol_type = other RNA
  modified_base 1: mod_base = OTHER; note = 2'-O-methyl modified nucleotide
  modified_base 2: mod_base = OTHER; note = 2'-O-methyl modified nucleotide
  modified_base 8: mod_base = OTHER; note = 2'-O-methyl modified nucleotide
  modified_base 9: mod_base = OTHER; note = 2'-O-methyl modified nucleotide
  modified_base 13: mod_base = OTHER; note = 2'-O-methyl modified nucleotide
  modified_base 15: mod_base = OTHER; note = 2'-O-methyl modified nucleotide
  modified_base 16: mod_base = OTHER; note = 2'-O-methyl modified nucleotide
  modified_base 17: mod_base = OTHER; note = 2'-O-methyl modified nucleotide
  modified_base 20: mod_base = OTHER; note = 2'-O-methyl modified nucleotide
  modified_base 21: mod_base = OTHER; note = 2'-O-methyl modified nucleotide
  modified_base 22: mod_base = OTHER; note = 2'-O-methyl modified nucleotide
  modified_base 24: mod_base = OTHER; note = 2'-O-methyl modified nucleotide
  modified_base 31: mod_base = OTHER; note = 2'-O-methyl modified nucleotide
  modified_base 32: mod_base = OTHER; note = 2'-O-methyl modified nucleotide
  modified_base 33: mod_base = OTHER; note = 2'-O-methyl modified nucleotide
  modified_base 35: mod_base = OTHER; note = 2'-O-methyl modified nucleotide
  modified_base 42: mod_base = OTHER; note = 2'-O-methyl modified nucleotide
  modified_base 43: mod_base = OTHER; note = 2'-O-methyl modified nucleotide
  modified_base 44: mod_base = OTHER; note = 2'-O-methyl modified nucleotide

SEQ ID NO: 306 - RNA, 42 nt, synthetic construct
  source 1..42: mol_type = other RNA
tgaatttctactgttgtagatatcacaggctccaggaagggt

SEQ ID NO: 307 - RNA, 42 nt, synthetic construct
  source 1..42: mol_type = other RNA
tgaatttctactgttgtagattcacaggctccaggaagggtt

SEQ ID NO: 308 - RNA, 42 nt, synthetic construct
  source 1..42: mol_type = other RNA
tgaatttctactgttgtagatgcctctgattagggtgggggc

SEQ ID NO: 309 - RNA, 44 nt, synthetic construct; identical to SEQ ID NO: 248
  source 1..44: mol_type = other RNA

SEQ ID NO: 310 - RNA, 42 nt, synthetic construct
  source 1..42: mol_type = other RNA
tgaatttctactgttgtagatcattgagatagtgtggggaag

SEQ ID NO: 311 - RNA, 42 nt, synthetic construct
  source 1..42: mol_type = other RNA
tgaatttctactgttgtagatagacagatatttgcattgaga

SEQ ID NO: 312 - RNA, 42 nt, synthetic construct
  source 1..42: mol_type = other RNA
tgaatttctactgttgtagatgccagggaccgtttcagacag

SEQ ID NO: 313 - RNA, 42 nt, synthetic construct
  source 1..42: mol_type = other RNA
tgaatttctactgttgtagatcggctggctagggatgaagaa

SEQ ID NO: 314 - RNA, 42 nt, synthetic construct; identical to SEQ ID NO: 310
  source 1..42: mol_type = other RNA

SEQ ID NO: 315 - RNA, 42 nt, synthetic construct; identical to SEQ ID NO: 311
  source 1..42: mol_type = other RNA

SEQ ID NO: 316 - RNA, 42 nt, synthetic construct; identical to SEQ ID NO: 312
  source 1..42: mol_type = other RNA

SEQ ID NO: 317 - RNA, 42 nt, synthetic construct; identical to SEQ ID NO: 313
  source 1..42: mol_type = other RNA

SEQ ID NO: 318 - RNA, 42 nt, synthetic construct; identical to SEQ ID NO: 306
  source 1..42: mol_type = other RNA

SEQ ID NO: 319 - RNA, 42 nt, synthetic construct; identical to SEQ ID NO: 307
  source 1..42: mol_type = other RNA

SEQ ID NO: 320 - RNA, 42 nt, synthetic construct; identical to SEQ ID NO: 308
  source 1..42: mol_type = other RNA

SEQ ID NO: 321 - RNA, 46 nt, synthetic construct
  source 1..46: mol_type = other RNA
tggatgaatttctactgttgtagatccttgtcaaggctattggtca

SEQ ID NO: 322 - RNA, 51 nt, synthetic construct
  source 1..51: mol_type = other RNA
gggaatggatgaatttctactgttgtagatccttgtcaaggctattggtca

SEQ ID NO: 323 - RNA, 57 nt, synthetic construct
  source 1..57: mol_type = other RNA
gtcaaagggaatggatgaatttctactgttgtagatccttgtcaaggctattggtca

SEQ ID NO: 324 - RNA, 67 nt, synthetic construct
  source 1..67: mol_type = other RNA
atgtgtttttgtcaaaagacctttttgaatttctactgttgtagatccttgtcaaggctattggtca

SEQ ID NO: 325 - RNA, 45 nt, synthetic construct
  source 1..45: mol_type = other RNA
tggataatttctactcttgtagatccttgtcaaggctattggtca

SEQ ID NO: 326 - RNA, 50 nt, synthetic construct
  source 1..50: mol_type = other RNA
gggaatggataatttctactcttgtagatccttgtcaaggctattggtca

SEQ ID NO: 327 - RNA, 56 nt, synthetic construct
  source 1..56: mol_type = other RNA
gtcaaagggaatggataatttctactcttgtagatccttgtcaaggctattggtca

SEQ ID NO: 328 - RNA, 66 nt, synthetic construct
  source 1..66: mol_type = other RNA
atgtgtttttgtcaaaagacctttttaatttctactcttgtagatccttgtcaaggctattggtca

SEQ ID NO: 329 - RNA, 39 nt, synthetic construct
  source 1..39: mol_type = other RNA
atttctactgttgtagatccttgtcaaggctattggtca

SEQ ID NO: 330 - RNA, 46 nt, synthetic construct; identical to SEQ ID NO: 321
  source 1..46: mol_type = other RNA
  modified_base 5: mod_base = OTHER; note = 2'-O-methyl modified nucleotide
  modified_base 6: mod_base = OTHER; note = 2'-O-methyl modified nucleotide
  modified_base 10: mod_base = OTHER; note = 2'-O-methyl modified nucleotide
  modified_base 11: mod_base = OTHER; note = 2'-O-methyl modified nucleotide
  modified_base 14: mod_base = OTHER; note = 2'-O-methyl modified nucleotide
  modified_base 15: mod_base = OTHER; note = 2'-O-methyl modified nucleotide
  modified_base 17: mod_base = OTHER; note = 2'-O-methyl modified nucleotide
  modified_base 18: mod_base = OTHER; note = 2'-O-methyl modified nucleotide
  modified_base 19: mod_base = OTHER; note = 2'-O-methyl modified nucleotide
  modified_base 21: mod_base = OTHER; note = 2'-O-methyl modified nucleotide
  modified_base 22: mod_base = OTHER; note = 2'-O-methyl modified nucleotide
  modified_base 23: mod_base = OTHER; note = 2'-O-methyl modified nucleotide
  modified_base 24: mod_base = OTHER; note = 2'-O-methyl modified nucleotide
  modified_base 26: mod_base = OTHER; note = 2'-O-methyl modified nucleotide
  modified_base 33: mod_base = OTHER; note = 2'-O-methyl modified nucleotide
  modified_base 34: mod_base = OTHER; note = 2'-O-methyl modified nucleotide
  modified_base 35: mod_base = OTHER; note = 2'-O-methyl modified nucleotide
  modified_base 37: mod_base = OTHER; note = 2'-O-methyl modified nucleotide
  modified_base 44: mod_base = OTHER; note = 2'-O-methyl modified nucleotide
  modified_base 45: mod_base = OTHER; note = 2'-O-methyl modified nucleotide
  modified_base 46: mod_base = OTHER; note = 2'-O-methyl modified nucleotide

SEQ ID NO: 331 - RNA, 55 nt, synthetic construct
  source 1..55: mol_type = other RNA
  modified_base 14: mod_base = OTHER; note = 2'-O-methyl modified nucleotide
  modified_base 15: mod_base = OTHER; note = 2'-O-methyl modified nucleotide
  modified_base 19: mod_base = OTHER; note = 2'-O-methyl modified nucleotide
  modified_base 20: mod_base = OTHER; note = 2'-O-methyl modified nucleotide
  modified_base 23: mod_base = OTHER; note = 2'-O-methyl modified nucleotide
  modified_base 24: mod_base = OTHER; note = 2'-O-methyl modified nucleotide
  modified_base 26: mod_base = OTHER; note = 2'-O-methyl modified nucleotide
  modified_base 27: mod_base = OTHER; note = 2'-O-methyl modified nucleotide
  modified_base 28: mod_base = OTHER; note = 2'-O-methyl modified nucleotide
  modified_base 30: mod_base = OTHER; note = 2'-O-methyl modified nucleotide
  modified_base 31: mod_base = OTHER; note = 2'-O-methyl modified nucleotide
  modified_base 32: mod_base = OTHER; note = 2'-O-methyl modified nucleotide
  modified_base 33: mod_base = OTHER; note = 2'-O-methyl modified nucleotide
  modified_base 35: mod_base = OTHER; note = 2'-O-methyl modified nucleotide
  modified_base 42: mod_base = OTHER; note = 2'-O-methyl modified nucleotide
  modified_base 43: mod_base = OTHER; note = 2'-O-methyl modified nucleotide
  modified_base 44: mod_base = OTHER; note = 2'-O-methyl modified nucleotide
  modified_base 46: mod_base = OTHER; note = 2'-O-methyl modified nucleotide
  modified_base 53: mod_base = OTHER; note = 2'-O-methyl modified nucleotide
  modified_base 54: mod_base = OTHER; note = 2'-O-methyl modified nucleotide
  modified_base 55: mod_base = OTHER; note = 2'-O-methyl modified nucleotide
gggaatggatggatgaatttctactgttgtagatccttgtcaaggctattggtca

SEQ ID NO: 332 - RNA, 57 nt, synthetic construct; identical to SEQ ID NO: 323
  source 1..57: mol_type = other RNA
  modified_base 16: mod_base = OTHER; note = 2'-O-methyl modified nucleotide
  modified_base 17: mod_base = OTHER; note = 2'-O-methyl modified nucleotide
  modified_base 21: mod_base = OTHER; note = 2'-O-methyl modified nucleotide
  modified_base 22: mod_base = OTHER; note = 2'-O-methyl modified nucleotide
  modified_base 25: mod_base = OTHER; note = 2'-O-methyl modified nucleotide
  modified_base 26: mod_base = OTHER; note = 2'-O-methyl modified nucleotide
  modified_base 28: mod_base = OTHER; note = 2'-O-methyl modified nucleotide
  modified_base 29: mod_base = OTHER; note = 2'-O-methyl modified nucleotide
  modified_base 30: mod_base = OTHER; note = 2'-O-methyl modified nucleotide
  modified_base 32: mod_base = OTHER; note = 2'-O-methyl modified nucleotide
  modified_base 33: mod_base = OTHER; note = 2'-O-methyl modified nucleotide
  modified_base 34: mod_base = OTHER; note = 2'-O-methyl modified nucleotide
  modified_base 35: mod_base = OTHER; note = 2'-O-methyl modified nucleotide
  modified_base 37: mod_base = OTHER; note = 2'-O-methyl modified nucleotide
  modified_base 44: mod_base = OTHER; note = 2'-O-methyl modified nucleotide
  modified_base 45: mod_base = OTHER; note = 2'-O-methyl modified nucleotide
  modified_base 46: mod_base = OTHER; note = 2'-O-methyl modified nucleotide
  modified_base 48: mod_base = OTHER; note = 2'-O-methyl modified nucleotide
  modified_base 55: mod_base = OTHER; note = 2'-O-methyl modified nucleotide
  modified_base 56: mod_base = OTHER; note = 2'-O-methyl modified nucleotide
  modified_base 57: mod_base = OTHER; note = 2'-O-methyl modified nucleotide

SEQ ID NO: 333 - RNA, 67 nt, synthetic construct; identical to SEQ ID NO: 324
  source 1..67: mol_type = other RNA
  modified_base 26: mod_base = OTHER; note = 2'-O-methyl modified nucleotide
  modified_base 27: mod_base = OTHER; note = 2'-O-methyl modified nucleotide
  modified_base 31: mod_base = OTHER; note = 2'-O-methyl modified nucleotide
  modified_base 32: mod_base = OTHER; note = 2'-O-methyl modified nucleotide
  modified_base 35: mod_base = OTHER; note = 2'-O-methyl modified nucleotide
  modified_base 36: mod_base = OTHER; note = 2'-O-methyl modified nucleotide
  modified_base 38: mod_base = OTHER; note = 2'-O-methyl modified nucleotide
  modified_base 39: mod_base = OTHER; note = 2'-O-methyl modified nucleotide
  modified_base 40: mod_base = OTHER; note = 2'-O-methyl modified nucleotide
  modified_base 42: mod_base = OTHER; note = 2'-O-methyl modified nucleotide
  modified_base 43: mod_base = OTHER; note = 2'-O-methyl modified nucleotide
  modified_base 44: mod_base = OTHER; note = 2'-O-methyl modified nucleotide
  modified_base 45: mod_base = OTHER; note = 2'-O-methyl modified nucleotide
  modified_base 47: mod_base = OTHER; note = 2'-O-methyl modified nucleotide
  modified_base 54: mod_base = OTHER; note = 2'-O-methyl modified nucleotide
  modified_base 55: mod_base = OTHER; note = 2'-O-methyl modified nucleotide
  modified_base 56: mod_base = OTHER; note = 2'-O-methyl modified nucleotide
  modified_base 58: mod_base = OTHER; note = 2'-O-methyl modified nucleotide
  modified_base 65: mod_base = OTHER; note = 2'-O-methyl modified nucleotide
  modified_base 66: mod_base = OTHER; note = 2'-O-methyl modified nucleotide
  modified_base 67: mod_base = OTHER; note = 2'-O-methyl modified nucleotide

SEQ ID NO: 334 - RNA, 48 nt, synthetic construct
  source 1..48: mol_type = other RNA
  modified_base 5: mod_base = OTHER; note = 2'-O-methyl modified nucleotide
  modified_base 6: mod_base = OTHER; note = 2'-O-methyl modified nucleotide
  modified_base 12: mod_base = OTHER; note = 2'-O-methyl modified nucleotide
  modified_base 13: mod_base = OTHER; note = 2'-O-methyl modified nucleotide
  modified_base 17: mod_base = OTHER; note = 2'-O-methyl modified nucleotide
  modified_base 19: mod_base = OTHER; note = 2'-O-methyl modified nucleotide
  modified_base 20: mod_base = OTHER; note = 2'-O-methyl modified nucleotide
  modified_base 21: mod_base = OTHER; note = 2'-O-methyl modified nucleotide
  modified_base 24: mod_base = OTHER; note = 2'-O-methyl modified nucleotide
  modified_base 25: mod_base = OTHER; note = 2'-O-methyl modified nucleotide
  modified_base 26: mod_base = OTHER; note = 2'-O-methyl modified nucleotide
  modified_base 28: mod_base = OTHER; note = 2'-O-methyl modified nucleotide
  modified_base 35: mod_base = OTHER; note = 2'-O-methyl modified nucleotide
  modified_base 36: mod_base = OTHER; note = 2'-O-methyl modified nucleotide
  modified_base 37: mod_base = OTHER; note = 2'-O-methyl modified nucleotide
  modified_base 39: mod_base = OTHER; note = 2'-O-methyl modified nucleotide
  modified_base 46: mod_base = OTHER; note = 2'-O-methyl modified nucleotide
  modified_base 47: mod_base = OTHER; note = 2'-O-methyl modified nucleotide
  modified_base 48: mod_base = OTHER; note = 2'-O-methyl modified nucleotide
tggatttgaatttctactgttgtagatccttgtcaaggctattggtca

SEQ ID NO: 335 - RNA, 53 nt, synthetic construct
  source 1..53: mol_type = other RNA
  modified_base 10: mod_base = OTHER; note = 2'-O-methyl modified nucleotide
  modified_base 11: mod_base = OTHER; note = 2'-O-methyl modified nucleotide
  modified_base 17: mod_base = OTHER; note = 2'-O-methyl modified nucleotide
  modified_base 18: mod_base = OTHER; note = 2'-O-methyl modified nucleotide
  modified_base 22: mod_base = OTHER; note = 2'-O-methyl modified nucleotide
  modified_base 24: mod_base = OTHER; note = 2'-O-methyl modified nucleotide
  modified_base 25: mod_base = OTHER; note = 2'-O-methyl modified nucleotide
  modified_base 26: mod_base = OTHER; note = 2'-O-methyl modified nucleotide
  modified_base 29: mod_base = OTHER; note = 2'-O-methyl modified nucleotide
  modified_base 30: mod_base = OTHER; note = 2'-O-methyl modified nucleotide
  modified_base 31: mod_base = OTHER; note = 2'-O-methyl modified nucleotide
  modified_base 33: mod_base = OTHER; note = 2'-O-methyl modified nucleotide
  modified_base 40: mod_base = OTHER; note = 2'-O-methyl modified nucleotide
  modified_base 41: mod_base = OTHER; note = 2'-O-methyl modified nucleotide
  modified_base 42: mod_base = OTHER; note = 2'-O-methyl modified nucleotide
  modified_base 44: mod_base = OTHER; note = 2'-O-methyl modified nucleotide
  modified_base 51: mod_base = OTHER; note = 2'-O-methyl modified nucleotide
  modified_base 52: mod_base = OTHER; note = 2'-O-methyl modified nucleotide
  modified_base 53: mod_base = OTHER; note = 2'-O-methyl modified nucleotide
gggaatggatttgaatttctactgttgtagatccttgtcaaggctattggtca

SEQ ID NO: 336 - RNA, 59 nt, synthetic construct
  source 1..59: mol_type = other RNA
  modified_base 16: mod_base = OTHER; note = 2'-O-methyl modified nucleotide
  modified_base 17: mod_base = OTHER; note = 2'-O-methyl modified nucleotide
  modified_base 23: mod_base = OTHER; note = 2'-O-methyl modified nucleotide
  modified_base 24: mod_base = OTHER; note = 2'-O-methyl modified nucleotide
  modified_base 28: mod_base = OTHER; note = 2'-O-methyl modified nucleotide
  modified_base 30: mod_base = OTHER; note = 2'-O-methyl modified nucleotide
  modified_base 31: mod_base = OTHER; note = 2'-O-methyl modified nucleotide
  modified_base 32: mod_base = OTHER; note = 2'-O-methyl modified nucleotide
  modified_base 35: mod_base = OTHER; note = 2'-O-methyl modified nucleotide
  modified_base 36: mod_base = OTHER; note = 2'-O-methyl modified nucleotide
  modified_base 37: mod_base = OTHER; note = 2'-O-methyl modified nucleotide
  modified_base 39: mod_base = OTHER; note = 2'-O-methyl modified nucleotide
  modified_base 46: mod_base = OTHER; note = 2'-O-methyl modified nucleotide
  modified_base 47: mod_base = OTHER; note = 2'-O-methyl modified nucleotide
  modified_base 48: mod_base = OTHER; note = 2'-O-methyl modified nucleotide
  modified_base 50: mod_base = OTHER; note = 2'-O-methyl modified nucleotide
  modified_base 57: mod_base = OTHER; note = 2'-O-methyl modified nucleotide
  modified_base 58: mod_base = OTHER; note = 2'-O-methyl modified nucleotide
  modified_base 59: mod_base = OTHER; note = 2'-O-methyl modified nucleotide
gtcaaagggaatggatttgaatttctactgttgtagatccttgtcaaggctattggtca

SEQ ID NO: 337 - RNA, 69 nt, synthetic construct
  source 1..69: mol_type = other RNA
  modified_base 26: mod_base = OTHER; note = 2'-O-methyl modified nucleotide
  modified_base 27: mod_base = OTHER; note = 2'-O-methyl modified nucleotide
  modified_base 33: mod_base = OTHER; note = 2'-O-methyl modified nucleotide
  modified_base 34: mod_base = OTHER; note = 2'-O-methyl modified nucleotide
  modified_base 38: mod_base = OTHER; note = 2'-O-methyl modified nucleotide
  modified_base 40: mod_base = OTHER; note = 2'-O-methyl modified nucleotide
  modified_base 41: mod_base = OTHER; note = 2'-O-methyl modified nucleotide
  modified_base 42: mod_base = OTHER; note = 2'-O-methyl modified nucleotide
  modified_base 45: mod_base = OTHER; note = 2'-O-methyl modified nucleotide
  modified_base 46: mod_base = OTHER; note = 2'-O-methyl modified nucleotide
  modified_base 47: mod_base = OTHER; note = 2'-O-methyl modified nucleotide
  modified_base 49: mod_base = OTHER; note = 2'-O-methyl modified nucleotide
  modified_base 56: mod_base = OTHER; note = 2'-O-methyl modified nucleotide
  modified_base 57: mod_base = OTHER; note = 2'-O-methyl modified nucleotide
  modified_base 58: mod_base = OTHER; note = 2'-O-methyl modified nucleotide
  modified_base 60: mod_base = OTHER; note = 2'-O-methyl modified nucleotide
  modified_base 67: mod_base = OTHER; note = 2'-O-methyl modified nucleotide
  modified_base 68: mod_base = OTHER; note = 2'-O-methyl modified nucleotide
  modified_base 69: mod_base = OTHER; note = 2'-O-methyl modified nucleotide
atgtgtttttgtcaaaagacctttttttgaatttctactgttgtagatccttgtcaaggctattggtca

SEQ ID NO: 338 - RNA, 47 nt, synthetic construct
  source 1..47: mol_type = other RNA
tgaatttctactgttgtagatccttgtcaaggctattggtcaccgat

SEQ ID NO: 339 - RNA, 47 nt, synthetic construct
  source 1..47: mol_type = other RNA
tgaatttctactgttgtagatccttgtcaaggctattggtcacgata

SEQ ID NO: 340 - RNA, 45 nt, synthetic construct
  source 1..45: mol_type = other RNA
tgaatttctactgttgtagatccttgtcaaggctattggtggcta

SEQ ID NO: 341 - RNA, 51 nt, synthetic construct
  source 1..51: mol_type = other RNA
tgaatttctactgttgtagatccttgtcaaggctattggtcattttgataa

SEQ ID NO: 342 - RNA, 45 nt, synthetic construct
  source 1..45: mol_type = other RNA
tgaatttctactgttgtagatccttgtcaaggctattggtcgata

SEQ ID NO: 343 - RNA, 46 nt, synthetic construct
  source 1..46: mol_type = other RNA
tgaatttctactgttgtagaccttgtcaaggctattggtcactata

SEQ ID NO: 344 - RNA, 51 nt, synthetic construct
  source 1..51: mol_type = other RNA
tgaatttctactgttgtagaccttgtcaaggctattggtcattttcgatag

SEQ ID NO: 345 - RNA, 48 nt, synthetic construct
  source 1..48: mol_type = other RNA
atttctactgttgtagaccttgtcaaggctattggtcattttcgatag

SEQ ID NO: 346 - RNA, 50 nt, synthetic construct
  source 1..50: mol_type = other RNA
tgaatttctactgttgtagaccttgtcaaggctattggtcattttcgata

SEQ ID NO: 347 - RNA, 45 nt, synthetic construct
  source 1..45: mol_type = other RNA
  modified_base 1: mod_base = OTHER; note = 2'-O-methyl modified nucleotide
  modified_base 2: mod_base = OTHER; note = 2'-O-methyl modified nucleotide
  modified_base 6: mod_base = OTHER; note = 2'-O-methyl modified nucleotide
  modified_base 7: mod_base = OTHER; note = 2'-O-methyl modified nucleotide
  modified_base 10: mod_base = OTHER; note = 2'-O-methyl modified nucleotide
  modified_base 11: mod_base = OTHER; note = 2'-O-methyl modified nucleotide
  modified_base 13: mod_base = OTHER; note = 2'-O-methyl modified nucleotide
  modified_base 14: mod_base = OTHER; note = 2'-O-methyl modified nucleotide
  modified_base 15: mod_base = OTHER; note = 2'-O-methyl modified nucleotide
  modified_base 17: mod_base = OTHER; note = 2'-O-methyl modified nucleotide
  modified_base 18: mod_base = OTHER; note = 2'-O-methyl modified nucleotide
  modified_base 21: mod_base = OTHER; note = 2'-O-methyl modified nucleotide
  modified_base 22: mod_base = OTHER; note = 2'-O-methyl modified nucleotide
  modified_base 29: mod_base = OTHER; note = 2'-O-methyl modified nucleotide
  modified_base 30: mod_base = OTHER; note = 2'-O-methyl modified nucleotide
  modified_base 31: mod_base = OTHER; note = 2'-O-methyl modified nucleotide
  modified_base 32: mod_base = OTHER; note = 2'-O-methyl modified nucleotide
  modified_base 33: mod_base = OTHER; note = 2'-O-methyl modified nucleotide
  modified_base 34: mod_base = OTHER; note = 2'-O-methyl modified nucleotide
  modified_base 40: mod_base = OTHER; note = 2'-O-methyl modified nucleotide
  modified_base 41: mod_base = OTHER; note = 2'-O-methyl modified nucleotide
  modified_base 42: mod_base = OTHER; note = 2'-O-methyl modified nucleotide
tgaatttctactgttgtagatccttgtcaaggctattggtcasss

SEQ ID NO: 348 - RNA, 46 nt, synthetic construct
  source 1..46: mol_type = other RNA
  modified_base 1: mod_base = OTHER; note = 2'-O-methyl modified nucleotide
  modified_base 2: mod_base = OTHER; note = 2'-O-methyl modified nucleotide
  modified_base 7: mod_base = OTHER; note = 2'-O-methyl modified nucleotide
  modified_base 10: mod_base = OTHER; note = 2'-O-methyl modified nucleotide
  modified_base 11: mod_base = OTHER; note = 2'-O-methyl modified nucleotide
  modified_base 13: mod_base = OTHER; note = 2'-O-methyl modified nucleotide
  modified_base 14: mod_base = OTHER; note = 2'-O-methyl modified nucleotide
  modified_base 15: mod_base = OTHER; note = 2'-O-methyl modified nucleotide
  modified_base 17: mod_base = OTHER; note = 2'-O-methyl modified nucleotide
  modified_base 18: mod_base = OTHER; note = 2'-O-methyl modified nucleotide
  modified_base 22: mod_base = OTHER; note = 2'-O-methyl modified nucleotide
  modified_base 29: mod_base = OTHER; note = 2'-O-methyl modified nucleotide
  modified_base 30: mod_base = OTHER; note = 2'-O-methyl modified nucleotide
  modified_base 31: mod_base = OTHER; note = 2'-O-methyl modified nucleotide
  modified_base 32: mod_base = OTHER; note = 2'-O-methyl modified nucleotide
  modified_base 40: mod_base = OTHER; note = 2'-O-methyl modified nucleotide
  modified_base 41: mod_base = OTHER; note = 2'-O-methyl modified nucleotide
  modified_base 42: mod_base = OTHER; note = 2'-O-methyl modified nucleotide
tgaatttctactgttgtagatccttgtcaaggctattggtcassss

SEQ ID NO: 349 - RNA, 47 nt, synthetic construct
  source 1..47: mol_type = other RNA
  modified_base 1: mod_base = OTHER; note = 2'-O-methyl modified nucleotide
  modified_base 2: mod_base = OTHER; note = 2'-O-methyl modified nucleotide
  modified_base 7: mod_base = OTHER; note = 2'-O-methyl modified nucleotide
  modified_base 10: mod_base = OTHER; note = 2'-O-methyl modified nucleotide
  modified_base 11: mod_base = OTHER; note = 2'-O-methyl modified nucleotide
  modified_base 13: mod_base = OTHER; note = 2'-O-methyl modified nucleotide
  modified_base 14: mod_base = OTHER; note = 2'-O-methyl modified nucleotide
  modified_base 15: mod_base = OTHER; note = 2'-O-methyl modified nucleotide
  modified_base 22: mod_base = OTHER; note = 2'-O-methyl modified nucleotide
  modified_base 29: mod_base = OTHER; note = 2'-O-methyl modified nucleotide
  modified_base 30: mod_base = OTHER; note = 2'-O-methyl modified nucleotide
  modified_base 31: mod_base = OTHER; note = 2'-O-methyl modified nucleotide
  modified_base 40: mod_base = OTHER; note = 2'-O-methyl modified nucleotide
  modified_base 41: mod_base = OTHER; note = 2'-O-methyl modified nucleotide
  modified_base 42: mod_base = OTHER; note = 2'-O-methyl modified nucleotide
tgaatttctactgttgtagatccttgtcaaggctattggtcasssss

SEQ ID NO: 350 - RNA, 43 nt, synthetic construct
  source 1..43: mol_type = other RNA
  modified_base 1: mod_base = OTHER; note = 5' Fluorescein modified nucleotide
  modified_base 43: mod_base = OTHER; note = 2'-O-methyl modified nucleotide
tgaatttctactgttgtagatccttgtcaaggctattggtcag

SEQ ID NO: 351 - RNA, 44 nt, synthetic construct
  source 1..44: mol_type = other RNA
  modified_base 1: mod_base = OTHER; note = 5' Fluorescein modified nucleotide
  modified_base 43: mod_base = OTHER; note = 2'-O-methyl modified nucleotide
  modified_base 44: mod_base = OTHER; note = 2'-O-methyl modified nucleotide
tgaatttctactgttgtagatccttgtcaaggctattggtcagg

SEQ ID NO: 352 - RNA, 45 nt, synthetic construct
  source 1..45: mol_type = other RNA
  modified_base 1: mod_base = OTHER; note = 5' Fluorescein modified nucleotide
  modified_base 43: mod_base = OTHER; note = 2'-O-methyl modified nucleotide
  modified_base 44: mod_base = OTHER; note = 2'-O-methyl modified nucleotide
  modified_base 45: mod_base = OTHER; note = 2'-O-methyl modified nucleotide
tgaatttctactgttgtagatccttgtcaaggctattggtcaggg

SEQ ID NO: 353 - RNA, 43 nt, synthetic construct
  source 1..43: mol_type = other RNA
  modified_base 1: mod_base = OTHER; note = 2'-O-methyl modified nucleotide
  modified_base 43: mod_base = OTHER; note = 3' Fluorescein modified nucleotide
gtgaatttctactgttgtagatccttgtcaaggctattggtca

SEQ ID NO: 354 - RNA, 44 nt, synthetic construct
  source 1..44: mol_type = other RNA
  modified_base 1: mod_base = OTHER; note = 2'-O-methyl modified nucleotide
  modified_base 2: mod_base = OTHER; note = 2'-O-methyl modified nucleotide
  modified_base 44: mod_base = OTHER; note = 3' Fluorescein modified nucleotide
ggtgaatttctactgttgtagatccttgtcaaggctattggtca

SEQ ID NO: 355 - RNA, 45 nt, synthetic construct
  source 1..45: mol_type = other RNA
  modified_base 1: mod_base = OTHER; note = 2'-O-methyl modified nucleotide
  modified_base 2: mod_base = OTHER; note = 2'-O-methyl modified nucleotide
  modified_base 3: mod_base = OTHER; note = 2'-O-methyl modified nucleotide
  modified_base 45: mod_base = OTHER; note = 3' Fluorescein modified nucleotide
gggtgaatttctactgttgtagatccttgtcaaggctattggtca

SEQ ID NO: 356 - DNA, 46 bp, synthetic construct
  source 1..46: mol_type = other DNA
  misc_feature 1..4: note = DNA
  misc_feature 5..46: note = RNA
tggatgaatttctactgttgtagatccttgtcaaggctattggtca

SEQ ID NO: 357 - DNA, 51 bp, synthetic construct
  source 1..51: mol_type = other DNA
  misc_feature 1..9: note = DNA
  misc_feature 10..51: note = RNA
gggaatggatgaatttctactgttgtagatccttgtcaaggctattggtca

SEQ ID NO: 358 - DNA, 57 bp, synthetic construct
  source 1..57: mol_type = other DNA
  misc_feature 1..15: note = DNA
  misc_feature 16..57: note = RNA
gtcaaagggaatggatgaatttctactgttgtagatccttgtcaaggctattggtca

SEQ ID NO: 359 - DNA, 67 bp, synthetic construct
  source 1..67: mol_type = other DNA
  misc_feature 1..25: note = DNA
  misc_feature 26..67: note = RNA
atgtgtttttgtcaaaagacctttttgaatttctactgttgtagatccttgtcaaggctattggtca

SEQ ID NO: 360 - DNA, 47 bp, synthetic construct
  source 1..47: mol_type = other DNA
  misc_feature 1..4: note = DNA
  misc_feature 5..47: note = RNA
tggatgaatttctactgttgtagatccttgtcaaggctattggtcas

SEQ ID NO: 361 - DNA, 52 bp, synthetic construct
  source 1..52: mol_type = other DNA
  misc_feature 1..9: note = DNA
  misc_feature 10..52: note = RNA
gggaatggatgaatttctactgttgtagatccttgtcaaggctattggtcas

SEQ ID NO: 362 - DNA, 58 bp, synthetic construct
  source 1..58: mol_type = other DNA
  misc_feature 1..15: note = DNA
  misc_feature 16..58: note = RNA
gtcaaagggaatggatgaatttctactgttgtagatccttgtcaaggctattggtcas

SEQ ID NO: 363 - DNA, 68 bp, synthetic construct
  source 1..68: mol_type = other DNA
  misc_feature 1..25: note = DNA
  misc_feature 26..68: note = RNA
atgtgtttttgtcaaaagacctttttgaatttctactgttgtagatccttgtcaaggctattggtcas

SEQ ID NO: 364 - RNA, 47 nt, synthetic construct
  source 1..47: mol_type = other RNA
tgaatttctactgttgtagatccttgtcaaggctattggtcactata

SEQ ID NO: 365 - RNA, 52 nt, synthetic construct
  source 1..52: mol_type = other RNA
tgaatttctactgttgtagatccttgtcaaggctattggtcattttcgatag

SEQ ID NO: 366 - RNA, 53 nt, synthetic construct
  source 1..53: mol_type = other RNA
  modified_base 53: mod_base = OTHER; note = 2'-O-methyl modified nucleotide
tgaatttctactgttgtagatccttgtcaaggctattggtcattttcgatags

SEQ ID NO: 367 - RNA, 51 nt, synthetic construct
  source 1..51: mol_type = other RNA
tgaatttctactgttgtagatccttgtcaaggctattggtcattttcgata

SEQ ID NO: 368 - RNA, 46 nt, synthetic construct
  source 1..46: mol_type = other RNA
  modified_base 5: mod_base = OTHER; note = 2'-O-methyl modified nucleotide
  modified_base 6: mod_base = OTHER; note = 2'-O-methyl modified nucleotide
  modified_base 10: mod_base = OTHER; note = 2'-O-methyl modified nucleotide
  modified_base 11: mod_base = OTHER; note = 2'-O-methyl modified nucleotide
  modified_base 13: mod_base = OTHER; note = 2'-O-methyl modified nucleotide
  modified_base 14: mod_base = OTHER; note = 2'-O-methyl modified nucleotide
  modified_base 15: mod_base = OTHER; note = 2'-O-methyl modified nucleotide
  modified_base 17: mod_base = OTHER; note = 2'-O-methyl modified nucleotide
  modified_base 18: mod_base = OTHER; note = 2'-O-methyl modified nucleotide
  modified_base 19: mod_base = OTHER; note = 2'-O-methyl modified nucleotide
  modified_base 21: mod_base = OTHER; note = 2'-O-methyl modified nucleotide
  modified_base 22: mod_base = OTHER; note = 2'-O-methyl modified nucleotide
  modified_base 23: mod_base = OTHER; note = 2'-O-methyl modified nucleotide
  modified_base 24: mod_base = OTHER; note = 2'-O-methyl modified nucleotide
tggatgaatttctactgttgtagatcattgagatagtgtggggaag

SEQ ID NO: 369 - RNA, 51 nt, synthetic construct
  source 1..51: mol_type = other RNA
  modified_base 10: mod_base = OTHER; note = 2'-O-methyl modified nucleotide
  modified_base 11: mod_base = OTHER; note = 2'-O-methyl modified nucleotide
  modified_base 15: mod_base = OTHER; note = 2'-O-methyl modified nucleotide
  modified_base 16: mod_base = OTHER; note = 2'-O-methyl modified nucleotide
  modified_base 18: mod_base = OTHER; note = 2'-O-methyl modified nucleotide
  modified_base 19: mod_base = OTHER; note = 2'-O-methyl modified nucleotide
  modified_base 20: mod_base = OTHER; note = 2'-O-methyl modified nucleotide
  modified_base 22: mod_base = OTHER; note = 2'-O-methyl modified nucleotide
  modified_base 23: mod_base = OTHER; note = 2'-O-methyl modified nucleotide
  modified_base 24: mod_base = OTHER; note = 2'-O-methyl modified nucleotide
  modified_base 26: mod_base = OTHER; note = 2'-O-methyl modified nucleotide
  modified_base 27: mod_base = OTHER; note = 2'-O-methyl modified nucleotide
  modified_base 28: mod_base = OTHER; note = 2'-O-methyl modified nucleotide
  modified_base 29: mod_base = OTHER; note = 2'-O-methyl modified nucleotide
gggaatggatgaatttctactgttgtagatcattgagatagtgtggggaag

SEQ ID NO: 370 - RNA, 57 nt, synthetic construct
  source 1..57: mol_type = other RNA
  modified_base 16: mod_base = OTHER; note = 2'-O-methyl modified nucleotide
  modified_base 17: mod_base = OTHER; note = 2'-O-methyl modified nucleotide
  modified_base 21: mod_base = OTHER; note = 2'-O-methyl modified nucleotide
  modified_base 22: mod_base = OTHER; note = 2'-O-methyl modified nucleotide
  modified_base 24: mod_base = OTHER; note = 2'-O-methyl modified nucleotide
  modified_base 25: mod_base = OTHER; note = 2'-O-methyl modified nucleotide
  modified_base 26: mod_base = OTHER; note = 2'-O-methyl modified nucleotide
  modified_base 28: mod_base = OTHER; note = 2'-O-methyl modified nucleotide
  modified_base 29: mod_base = OTHER; note = 2'-O-methyl modified nucleotide
  modified_base 30: mod_base = OTHER; note = 2'-O-methyl modified nucleotide
  modified_base 32: mod_base = OTHER; note = 2'-O-methyl modified nucleotide
  modified_base 33: mod_base = OTHER; note = 2'-O-methyl modified nucleotide
  modified_base 34: mod_base = OTHER; note = 2'-O-methyl modified nucleotide
  modified_base 35: mod_base = OTHER; note = 2'-O-methyl modified nucleotide
gtcaaagggaatggatgaatttctactgttgtagatcattgagatagtgtggggaag

SEQ ID NO: 371 - RNA, 67 nt, synthetic construct
  source 1..67: mol_type = other RNA
  modified_base 26: mod_base = OTHER; note = 2'-O-methyl modified nucleotide
  modified_base 27: mod_base = OTHER; note = 2'-O-methyl modified nucleotide
  modified_base 31: mod_base = OTHER; note = 2'-O-methyl modified nucleotide
  modified_base 32: mod_base = OTHER; note = 2'-O-methyl modified nucleotide
  modified_base 34: mod_base = OTHER; note = 2'-O-methyl modified nucleotide
  modified_base 35: mod_base = OTHER; note = 2'-O-methyl modified nucleotide
  modified_base 36: mod_base = OTHER; note = 2'-O-methyl modified nucleotide
  modified_base 38: mod_base = OTHER; note = 2'-O-methyl modified nucleotide
  modified_base 39: mod_base = OTHER; note = 2'-O-methyl modified nucleotide
  modified_base 40: mod_base = OTHER; note = 2'-O-methyl modified nucleotide
  modified_base 42: mod_base = OTHER; note = 2'-O-methyl modified nucleotide
  modified_base 43: mod_base = OTHER; note = 2'-O-methyl modified nucleotide
  modified_base 44: mod_base = OTHER; note = 2'-O-methyl modified nucleotide
  modified_base 45: mod_base = OTHER; note = 2'-O-methyl modified nucleotide
atgtgtttttgtcaaaagacctttttgaatttctactgttgtagatcattgagatagtgtggggaag

SEQ ID NO: 372 - RNA, 47 nt, synthetic construct
  source 1..47: mol_type = other RNA
  modified_base 5: mod_base = OTHER; note = 2'-O-methyl modified nucleotide
  modified_base 6: mod_base = OTHER; note = 2'-O-methyl modified nucleotide
  modified_base 10: mod_base = OTHER; note = 2'-O-methyl modified nucleotide
  modified_base 11: mod_base = OTHER; note = 2'-O-methyl modified nucleotide
  modified_base 13: mod_base = OTHER; note = 2'-O-methyl modified nucleotide
  modified_base 14: mod_base = OTHER; note = 2'-O-methyl modified nucleotide
  modified_base 15: mod_base = OTHER; note = 2'-O-methyl modified nucleotide
  modified_base 17: mod_base = OTHER; note = 2'-O-methyl modified nucleotide
  modified_base 18: mod_base = OTHER; note = 2'-O-methyl modified nucleotide
  modified_base 19: mod_base = OTHER; note = 2'-O-methyl modified nucleotide
  modified_base 21: mod_base = OTHER; note = 2'-O-methyl modified nucleotide
  modified_base 22: mod_base = OTHER; note = 2'-O-methyl modified nucleotide
  modified_base 23: mod_base = OTHER; note = 2'-O-methyl modified nucleotide
  modified_base 24: mod_base = OTHER; note = 2'-O-methyl modified nucleotide
  modified_base 26: mod_base = OTHER; note = 2'-O-methyl modified nucleotide
  modified_base 34: mod_base = OTHER; note = 2'-O-methyl modified nucleotide
  modified_base 35: mod_base = OTHER; note = 2'-O-methyl modified nucleotide
  modified_base 36: mod_base = OTHER; note = 2'-O-methyl modified nucleotide
  modified_base 38: mod_base = OTHER; note = 2'-O-methyl modified nucleotide
  modified_base 44: mod_base = OTHER; note = 2'-O-methyl modified nucleotide
  modified_base 45: mod_base = OTHER; note = 2'-O-methyl modified nucleotide
  modified_base 46: mod_base = OTHER; note = 2'-O-methyl modified nucleotide
  modified_base 47: mod_base = OTHER; note = 2'-O-methyl modified nucleotide
tggatgaatttctactgttgtagatcattgagatagtgtggggaags

SEQ ID NO: 373 - RNA, 53 nt, synthetic construct
  source 1..53: mol_type = other RNA
  modified_base 10: mod_base = OTHER; note = 2'-O-methyl modified nucleotide
  modified_base 11: mod_base = OTHER; note = 2'-O-methyl modified nucleotide
  modified_base 15: mod_base = OTHER; note = 2'-O-methyl modified nucleotide
  modified_base 16: mod_base = OTHER; note = 2'-O-methyl modified nucleotide
  modified_base 18: mod_base = OTHER; note = 2'-O-methyl modified nucleotide
  modified_base 19: mod_base = OTHER; note = 2'-O-methyl modified nucleotide
  modified_base 20: mod_base = OTHER; note = 2'-O-methyl modified nucleotide
  modified_base 22: mod_base = OTHER; note = 2'-O-methyl modified nucleotide
  modified_base 23: mod_base = OTHER; note = 2'-O-methyl modified nucleotide
  modified_base 24: mod_base = OTHER; note = 2'-O-methyl modified nucleotide
  modified_base 26: mod_base = OTHER; note = 2'-O-methyl modified nucleotide
  modified_base 27: mod_base = OTHER; note = 2'-O-methyl modified nucleotide
  modified_base 28: mod_base = OTHER; note = 2'-O-methyl modified nucleotide
  modified_base 29: mod_base = OTHER; note = 2'-O-methyl modified nucleotide
  modified_base 31: mod_base = OTHER; note = 2'-O-methyl modified nucleotide
  modified_base 39: mod_base = OTHER; note = 2'-O-methyl modified nucleotide
  modified_base 40: mod_base = OTHER; note = 2'-O-methyl modified nucleotide
  modified_base 41: mod_base = OTHER; note = 2'-O-methyl modified nucleotide
  modified_base 43: mod_base = OTHER; note = 2'-O-methyl modified nucleotide
  modified_base 49: mod_base = OTHER; note = 2'-O-methyl modified nucleotide
  modified_base 50: mod_base = OTHER; note = 2'-O-methyl modified nucleotide
  modified_base 51: mod_base = OTHER; note = 2'-O-methyl modified nucleotide
  modified_base 52: mod_base = OTHER; note = 2'-O-methyl modified nucleotide
  modified_base 53: mod_base = OTHER; note = 2'-O-methyl modified nucleotide
gggaatggatgaatttctactgttgtagatcattgagatagtgtggggaagss

SEQ ID NO: 374 - RNA, 60 nt, synthetic construct
  source 1..60: mol_type = other RNA
  modified_base 16: mod_base = OTHER; note = 2'-O-methyl modified nucleotide
  modified_base 17: mod_base = OTHER; note = 2'-O-methyl modified nucleotide
  modified_base 21: mod_base = OTHER; note = 2'-O-methyl modified nucleotide
  modified_base 22: mod_base = OTHER; note = 2'-O-methyl modified nucleotide
  modified_base 24: mod_base = OTHER; note = 2'-O-methyl modified nucleotide
  modified_base 25: mod_base = OTHER; note = 2'-O-methyl modified nucleotide
  modified_base 26: mod_base = OTHER; note = 2'-O-methyl modified nucleotide
  modified_base 28: mod_base = OTHER; note = 2'-O-methyl modified nucleotide
  modified_base 29: mod_base = OTHER; note = 2'-O-methyl modified nucleotide
  modified_base 30: mod_base = OTHER; note = 2'-O-methyl modified nucleotide
  modified_base 32: mod_base = OTHER; note = 2'-O-methyl modified nucleotide
  modified_base 33: mod_base = OTHER; note = 2'-O-methyl modified nucleotide
  modified_base 34: mod_base = OTHER; note = 2'-O-methyl modified nucleotide
  modified_base 35: mod_base = OTHER; note = 2'-O-methyl modified nucleotide
  modified_base 37: mod_base = OTHER; note = 2'-O-methyl modified nucleotide
  modified_base 45: mod_base = OTHER; note = 2'-O-methyl modified nucleotide
  modified_base 46: mod_base = OTHER; note = 2'-O-methyl modified nucleotide
  modified_base 47: mod_base = OTHER; note = 2'-O-methyl modified nucleotide
  modified_base 49: mod_base = OTHER; note = 2'-O-methyl modified nucleotide
  modified_base 55: mod_base = OTHER; note = 2'-O-methyl modified nucleotide
  modified_base 56: mod_base = OTHER; note = 2'-O-methyl modified nucleotide
  modified_base 57: mod_base = OTHER; note = 2'-O-methyl modified nucleotide
  modified_base 58: mod_base = OTHER; note = 2'-O-methyl modified nucleotide
  modified_base 59: mod_base = OTHER; note = 2'-O-methyl modified nucleotide
  modified_base 60: mod_base = OTHER; note = 2'-O-methyl modified nucleotide
gtcaaagggaatggatgaatttctactgttgtagatcattgagatagtgtggggaagsss

SEQ ID NO: 375 - RNA, 68 nt, synthetic construct
  source 1..68: mol_type = other RNA
  modified_base 26: mod_base = OTHER; note = 2'-O-methyl modified nucleotide
  modified_base 27: mod_base = OTHER; note = 2'-O-methyl modified nucleotide
  modified_base 31: mod_base = OTHER; note = 2'-O-methyl modified nucleotide
  modified_base 32: mod_base = OTHER; note = 2'-O-methyl modified nucleotide
  modified_base 34: mod_base = OTHER; note = 2'-O-methyl modified nucleotide
  modified_base 35: mod_base = OTHER; note = 2'-O-methyl modified nucleotide
  modified_base 36: mod_base = OTHER; note = 2'-O-methyl modified nucleotide
  modified_base 38: mod_base = OTHER; note = 2'-O-methyl modified nucleotide
  modified_base 39: mod_base = OTHER; note = 2'-O-methyl modified nucleotide
  modified_base 40: mod_base = OTHER; note = 2'-O-methyl modified nucleotide
  modified_base 42: mod_base = OTHER; note = 2'-O-methyl modified nucleotide
  modified_base 43: mod_base = OTHER; note = 2'-O-methyl modified nucleotide
  modified_base 44: mod_base = OTHER; note = 2'-O-methyl modified nucleotide
  modified_base 45: mod_base = OTHER; note = 2'-O-methyl modified nucleotide
  modified_base 47: mod_base = OTHER; note = 2'-O-methyl modified nucleotide
  modified_base 55: mod_base = OTHER; note = 2'-O-methyl modified nucleotide
  modified_base 56: mod_base = OTHER; note = 2'-O-methyl modified nucleotide
  modified_base 57: mod_base = OTHER; note = 2'-O-methyl modified nucleotide
  modified_base 59: mod_base = OTHER; note = 2'-O-methyl modified nucleotide
  modified_base 65: mod_base = OTHER; note = 2'-O-methyl modified nucleotide
  modified_base 66: mod_base = OTHER; note = 2'-O-methyl modified nucleotide
  modified_base 67: mod_base = OTHER; note = 2'-O-methyl modified nucleotide
  modified_base 68: mod_base = OTHER; note = 2'-O-methyl modified nucleotide
atgtgtttttgtcaaaagacctttttgaatttctactgttgtagatcattgagatagtgtggggaags

SEQ ID NO: 376 - RNA, 46 nt, synthetic construct
  source 1..46: mol_type = other RNA
  modified_base 5: mod_base = OTHER; note = 2'-O-methyl modified nucleotide
  modified_base 6: mod_base = OTHER; note = 2'-O-methyl modified nucleotide
  modified_base 10: mod_base = OTHER; note = 2'-O-methyl modified nucleotide
  modified_base 11: mod_base = OTHER; note = 2'-O-methyl modified nucleotide
  modified_base 13: mod_base = OTHER; note = 2'-O-methyl modified nucleotide
  modified_base 14: mod_base = OTHER; note = 2'-O-methyl modified nucleotide
  modified_base 15: mod_base = OTHER; note = 2'-O-methyl modified nucleotide
  modified_base 17: mod_base = OTHER; note = 2'-O-methyl modified nucleotide
  modified_base 18: mod_base = OTHER; note = 2'-O-methyl modified nucleotide
  modified_base 19: mod_base = OTHER; note = 2'-O-methyl modified nucleotide
  modified_base 21: mod_base = OTHER; note = 2'-O-methyl modified nucleotide
  modified_base 22: mod_base = OTHER; note = 2'-O-methyl modified nucleotide
  modified_base 23: mod_base = OTHER; note = 2'-O-methyl modified nucleotide
  modified_base 24: mod_base = OTHER; note = 2'-O-methyl modified nucleotide
tggatgaatttctactgttgtagattcacaggctccaggaagggtt

SEQ ID NO: 377 - RNA, 51 nt, synthetic construct
  source 1..51: mol_type = other RNA
  modified_base 10: mod_base = OTHER; note = 2'-O-methyl modified nucleotide
  modified_base 11: mod_base = OTHER; note = 2'-O-methyl modified nucleotide
  modified_base 15: mod_base = OTHER; note = 2'-O-methyl modified nucleotide
  modified_base 16: mod_base = OTHER; note = 2'-O-methyl modified nucleotide
  modified_base 18: mod_base = OTHER; note = 2'-O-methyl modified nucleotide
  modified_base 19: mod_base = OTHER; note = 2'-O-methyl modified nucleotide
  modified_base 20: mod_base = OTHER; note = 2'-O-methyl modified nucleotide
  modified_base 22: mod_base = OTHER; note = 2'-O-methyl modified nucleotide
  modified_base 23: mod_base = OTHER; note = 2'-O-methyl modified nucleotide
  modified_base 24: mod_base = OTHER; note = 2'-O-methyl modified nucleotide
  modified_base 26: mod_base = OTHER; note = 2'-O-methyl modified nucleotide
  modified_base 27: mod_base = OTHER; note = 2'-O-methyl modified nucleotide
  modified_base 28: mod_base = OTHER; note = 2'-O-methyl modified nucleotide
  modified_base 29: mod_base = OTHER; note = 2'-O-methyl modified nucleotide
gggaatggatgaatttctactgttgtagattcacaggctccaggaagggtt

SEQ ID NO: 378 - RNA, 57 nt, synthetic construct
  source 1..57: mol_type = other RNA
  modified_base 16: mod_base = OTHER; note = 2'-O-methyl modified nucleotide
  modified_base 17: mod_base = OTHER; note = 2'-O-methyl modified nucleotide
  modified_base 21: mod_base = OTHER; note = 2'-O-methyl modified nucleotide
  modified_base 22: mod_base = OTHER; note = 2'-O-methyl modified nucleotide
  modified_base 24: mod_base = OTHER; note = 2'-O-methyl modified nucleotide
  modified_base 25: mod_base = OTHER; note = 2'-O-methyl modified nucleotide
  modified_base 26: mod_base = OTHER; note = 2'-O-methyl modified nucleotide
  modified_base 28: mod_base = OTHER; note = 2'-O-methyl modified nucleotide
  modified_base 29: mod_base = OTHER; note = 2'-O-methyl modified nucleotide
  modified_base 30: mod_base = OTHER; note = 2'-O-methyl modified nucleotide
  modified_base 32: mod_base = OTHER; note = 2'-O-methyl modified nucleotide
  modified_base 33: mod_base = OTHER; note = 2'-O-methyl modified nucleotide
  modified_base 34: mod_base = OTHER; note = 2'-O-methyl modified nucleotide
  modified_base 35: mod_base = OTHER; note = 2'-O-methyl modified nucleotide
gtcaaagggaatggatgaatttctactgttgtagattcacaggctccaggaagggtt

SEQ ID NO: 379 - RNA, 67 nt, synthetic construct
  source 1..67: mol_type = other RNA
  modified_base 26: mod_base = OTHER; note = 2'-O-methyl modified nucleotide
  modified_base 27: mod_base = OTHER; note = 2'-O-methyl modified nucleotide
  modified_base 31: mod_base = OTHER; note = 2'-O-methyl modified nucleotide
  modified_base 32: mod_base = OTHER; note = 2'-O-methyl modified nucleotide
  modified_base 34: mod_base = OTHER; note = 2'-O-methyl modified nucleotide
  modified_base 35: mod_base = OTHER; note = 2'-O-methyl modified nucleotide
  modified_base 36: mod_base = OTHER; note = 2'-O-methyl modified nucleotide
  modified_base 38: mod_base = OTHER; note = 2'-O-methyl modified nucleotide
  modified_base 39: mod_base = OTHER; note = 2'-O-methyl modified nucleotide
  modified_base 40: mod_base = OTHER; note = 2'-O-methyl modified nucleotide
  modified_base 42: mod_base = OTHER; note = 2'-O-methyl modified nucleotide
  modified_base 43: mod_base = OTHER; note = 2'-O-methyl modified nucleotide
  modified_base 44: mod_base = OTHER; note = 2'-O-methyl modified nucleotide
  modified_base 45: mod_base = OTHER; note = 2'-O-methyl modified nucleotide
atgtgtttttgtcaaaagacctttttgaatttctactgttgtagattcacaggctccaggaagggtt

SEQ ID NO: 380 - RNA, 47 nt, synthetic construct
  source 1..47: mol_type = other RNA
  modified_base 5: mod_base = OTHER; note = 2'-O-methyl modified nucleotide
  modified_base 6: mod_base = OTHER; note = 2'-O-methyl modified nucleotide
  modified_base 10: mod_base = OTHER; note = 2'-O-methyl modified nucleotide
  modified_base 11: mod_base = OTHER; note = 2'-O-methyl modified nucleotide
  modified_base 13: mod_base = OTHER; note = 2'-O-methyl modified nucleotide
  modified_base 14: mod_base = OTHER; note = 2'-O-methyl modified nucleotide
  modified_base 15: mod_base = OTHER; note = 2'-O-methyl modified nucleotide
  modified_base 17: mod_base = OTHER; note = 2'-O-methyl modified nucleotide
  modified_base 18: mod_base = OTHER; note = 2'-O-methyl modified nucleotide
  modified_base 19: mod_base = OTHER; note = 2'-O-methyl modified nucleotide
  modified_base 21: mod_base = OTHER; note = 2'-O-methyl modified nucleotide
  modified_base 22: mod_base = OTHER; note = 2'-O-methyl modified nucleotide
  modified_base 23: mod_base = OTHER; note = 2'-O-methyl modified nucleotide
  modified_base 24: mod_base = OTHER; note = 2'-O-methyl modified nucleotide
  modified_base 26: mod_base = OTHER; note = 2'-O-methyl modified nucleotide
  modified_base 33: mod_base = OTHER; note = 2'-O-methyl modified nucleotide
  modified_base 34: mod_base = OTHER; note = 2'-O-methyl modified nucleotide
  modified_base 35: mod_base = OTHER; note = 2'-O-methyl modified nucleotide
  modified_base 36: mod_base = OTHER; note = 2'-O-methyl modified nucleotide
  modified_base 38: mod_base = OTHER; note = 2'-O-methyl modified nucleotide
  modified_base 44: mod_base = OTHER; note = 2'-O-methyl modified nucleotide
  modified_base 45: mod_base = OTHER; note = 2'-O-methyl modified nucleotide
  modified_base 46: mod_base = OTHER; note = 2'-O-methyl modified nucleotide
  modified_base 47: mod_base = OTHER; note = 2'-O-methyl modified nucleotide
tggatgaatttctactgttgtagattcacaggctccaggaagggtts

SEQ ID NO: 381 - RNA, 53 nt, synthetic construct
  source 1..53: mol_type = other RNA
  modified_base 10: mod_base = OTHER; note = 2'-O-methyl modified nucleotide
  modified_base 11: mod_base = OTHER; note = 2'-O-methyl modified nucleotide
  modified_base 15: mod_base = OTHER; note = 2'-O-methyl modified nucleotide
  modified_base 16: mod_base = OTHER; note = 2'-O-methyl modified nucleotide
  modified_base 18: mod_base = OTHER; note = 2'-O-methyl modified nucleotide
  modified_base 19: mod_base = OTHER; note = 2'-O-methyl modified nucleotide
  modified_base 20: mod_base = OTHER; note = 2'-O-methyl modified nucleotide
  modified_base 22: mod_base = OTHER; note = 2'-O-methyl modified nucleotide
  modified_base 23: mod_base = OTHER; note = 2'-O-methyl modified nucleotide
  modified_base 24: mod_base = OTHER; note = 2'-O-methyl modified nucleotide
  modified_base 26: mod_base = OTHER; note = 2'-O-methyl modified nucleotide
  modified_base 27: mod_base = OTHER; note = 2'-O-methyl modified nucleotide
  modified_base 28: mod_base = OTHER; note = 2'-O-methyl modified nucleotide
  modified_base 29: mod_base = OTHER; note = 2'-O-methyl modified nucleotide
  modified_base 31: mod_base = OTHER; note = 2'-O-methyl modified nucleotide
  modified_base 38: mod_base = OTHER; note = 2'-O-methyl modified nucleotide
  modified_base 39: mod_base = OTHER; note = 2'-O-methyl modified nucleotide
  modified_base 40: mod_base = OTHER; note = 2'-O-methyl modified nucleotide
  modified_base 41: mod_base = OTHER; note = 2'-O-methyl modified nucleotide
  modified_base 43: mod_base = OTHER; note = 2'-O-methyl modified nucleotide
  modified_base 49: mod_base = OTHER; note = 2'-O-methyl modified nucleotide
  modified_base 50: mod_base = OTHER; note = 2'-O-methyl modified nucleotide
  modified_base 51: mod_base = OTHER; note = 2'-O-methyl modified nucleotide
  modified_base 52: mod_base = OTHER; note = 2'-O-methyl modified nucleotide
  modified_base 53: mod_base = OTHER; note = 2'-O-methyl modified nucleotide
gggaatggatgaatttctactgttgtagattcacaggctccaggaagggttss

SEQ ID NO: 382 - RNA, 60 nt, synthetic construct
  source 1..60: mol_type = other RNA
  modified_base 16: mod_base = OTHER; note = 2'-O-methyl modified nucleotide
  modified_base 17: mod_base = OTHER; note = 2'-O-methyl modified nucleotide
  modified_base 21: mod_base = OTHER; note = 2'-O-methyl modified nucleotide
  modified_base 22: mod_base = OTHER; note = 2'-O-methyl modified nucleotide
  modified_base 24: mod_base = OTHER; note = 2'-O-methyl modified nucleotide
  modified_base 25: mod_base = OTHER; note = 2'-O-methyl modified nucleotide
  modified_base 26: mod_base = OTHER; note = 2'-O-methyl modified nucleotide
  modified_base 28: mod_base = OTHER; note = 2'-O-methyl modified nucleotide
  modified_base 29: mod_base = OTHER; note = 2'-O-methyl modified nucleotide
  modified_base 30: mod_base = OTHER; note = 2'-O-methyl modified nucleotide
  modified_base 32: mod_base = OTHER; note = 2'-O-methyl modified nucleotide
  modified_base 33: mod_base = OTHER; note = 2'-O-methyl modified nucleotide
  modified_base 34: mod_base = OTHER; note = 2'-O-methyl modified nucleotide
  modified_base 35: mod_base = OTHER; note = 2'-O-methyl modified nucleotide
  modified_base 37: mod_base = OTHER; note = 2'-O-methyl modified nucleotide
  modified_base 44: mod_base = OTHER; note = 2'-O-methyl modified nucleotide
  modified_base 45: mod_base = OTHER; note = 2'-O-methyl modified nucleotide
  modified_base 46: mod_base = OTHER; note = 2'-O-methyl modified nucleotide
  modified_base 47: mod_base = OTHER; note = 2'-O-methyl modified nucleotide
  modified_base 49: mod_base = OTHER; note = 2'-O-methyl modified nucleotide
  modified_base 55: mod_base = OTHER; note = 2'-O-methyl modified nucleotide
  modified_base 56: mod_base = OTHER; note = 2'-O-methyl modified nucleotide
  modified_base 57: mod_base = OTHER; note = 2'-O-methyl modified nucleotide
  modified_base 58: mod_base = OTHER; note = 2'-O-methyl modified nucleotide
  modified_base 59: mod_base = OTHER; note = 2'-O-methyl modified nucleotide
  modified_base 60: mod_base = OTHER; note = 2'-O-methyl modified nucleotide
gtcaaagggaatggatgaatttctactgttgtagattcacaggctccaggaagggttsss

SEQ ID NO: 383 - RNA, 71 nt, synthetic construct
  source 1..71: mol_type = other RNA
  modified_base 26: mod_base = OTHER; note = 2'-O-methyl modified nucleotide
  modified_base 27: mod_base = OTHER; note = 2'-O-methyl modified nucleotide
  modified_base 31: mod_base = OTHER; note = 2'-O-methyl modified nucleotide
  modified_base 32: mod_base = OTHER; note = 2'-O-methyl modified nucleotide
  modified_base 34: mod_base = OTHER; note = 2'-O-methyl modified nucleotide
  modified_base 35: mod_base = OTHER; note = 2'-O-methyl modified nucleotide
  modified_base 36: mod_base = OTHER; note = 2'-O-methyl modified nucleotide
  modified_base 38: mod_base = OTHER; note = 2'-O-methyl modified nucleotide
  modified_base 39: mod_base = OTHER; note = 2'-O-methyl modified nucleotide
  modified_base 40: mod_base = OTHER; note = 2'-O-methyl modified nucleotide
  modified_base 42: mod_base = OTHER; note = 2'-O-methyl modified nucleotide
  modified_base 43: mod_base = OTHER; note = 2'-O-methyl modified nucleotide
  modified_base 44: mod_base = OTHER; note = 2'-O-methyl modified nucleotide
  modified_base 45: mod_base = OTHER; note = 2'-O-methyl modified nucleotide
  modified_base 47: mod_base = OTHER; note = 2'-O-methyl modified nucleotide
  modified_base 54: mod_base = OTHER; note = 2'-O-methyl modified nucleotide
  modified_base 55: mod_base = OTHER; note = 2'-O-methyl modified nucleotide
  modified_base 56: mod_base = OTHER; note = 2'-O-methyl modified nucleotide
  modified_base 57: mod_base = OTHER; note = 2'-O-methyl modified nucleotide
  modified_base 59: mod_base = OTHER; note = 2'-O-methyl modified nucleotide
  modified_base 65: mod_base = OTHER; note = 2'-O-methyl modified nucleotide
  modified_base 66: mod_base = OTHER; note = 2'-O-methyl modified nucleotide
  modified_base 67: mod_base = OTHER; note = 2'-O-methyl modified nucleotide
  modified_base 68: mod_base = OTHER; note = 2'-O-methyl modified nucleotide
  modified_base 69: mod_base = OTHER; note = 2'-O-methyl modified nucleotide
  modified_base 70: mod_base = OTHER; note = 2'-O-methyl modified nucleotide
  modified_base 71: mod_base = OTHER; note = 2'-O-methyl modified nucleotide
atgtgtttttgtcaaaagacctttttgaatttctactgttgtagattcacaggctccaggaagggttssss

SEQ ID NO: 384 - RNA, 50 nt, synthetic construct
  source 1..50: mol_type = other RNA
  modified_base 9: mod_base = OTHER; note = 2'-O-methyl modified nucleotide
  modified_base 10: mod_base = OTHER; note = 2'-O-methyl modified nucleotide
  modified_base 14: mod_base = OTHER; note = 2'-O-methyl modified nucleotide
  modified_base 15: mod_base = OTHER; note = 2'-O-methyl modified nucleotide
  modified_base 17: mod_base = OTHER; note = 2'-O-methyl modified nucleotide
  modified_base 18: mod_base = OTHER; note = 2'-O-methyl modified nucleotide
  modified_base 19: mod_base = OTHER; note = 2'-O-methyl modified nucleotide
  modified_base 21: mod_base = OTHER; note = 2'-O-methyl modified nucleotide
  modified_base 22: mod_base = OTHER; note = 2'-O-methyl modified nucleotide
  modified_base 23: mod_base = OTHER; note = 2'-O-methyl modified nucleotide
  modified_base 25: mod_base = OTHER; note = 2'-O-methyl modified nucleotide
  modified_base 26: mod_base = OTHER; note = 2'-O-methyl modified nucleotide
  modified_base 27: mod_base = OTHER; note = 2'-O-methyl modified nucleotide
  modified_base 28: mod_base = OTHER; note = 2'-O-methyl modified nucleotide
  modified_base 30: mod_base = OTHER; note = 2'-O-methyl modified nucleotide
  modified_base 38: mod_base = OTHER; note = 2'-O-methyl modified nucleotide
  modified_base 39: mod_base = OTHER; note = 2'-O-methyl modified nucleotide
  modified_base 40: mod_base = OTHER; note = 2'-O-methyl modified nucleotide
  modified_base 42: mod_base = OTHER; note = 2'-O-methyl modified nucleotide
  modified_base 48: mod_base = OTHER; note = 2'-O-methyl modified nucleotide
  modified_base 49: mod_base = OTHER; note = 2'-O-methyl modified nucleotide
  modified_base 50: mod_base = OTHER; note = 2'-O-methyl modified nucleotide
tttttttttgaatttctactgttgtagatcattgagatagtgtggggaag

SEQ ID NO: 385 - RNA, 63 nt, synthetic construct
  source 1..63: mol_type = other RNA
  modified_base 22: mod_base = OTHER; note = 2'-O-methyl modified nucleotide
  modified_base 23: mod_base = OTHER; note = 2'-O-methyl modified nucleotide
  modified_base 27: mod_base = OTHER; note = 2'-O-methyl modified nucleotide
  modified_base 28: mod_base = OTHER; note = 2'-O-methyl modified nucleotide
  modified_base 30: mod_base = OTHER; note = 2'-O-methyl modified nucleotide
  modified_base 31: mod_base = OTHER; note = 2'-O-methyl modified nucleotide
  modified_base 32: mod_base = OTHER; note = 2'-O-methyl modified nucleotide
  modified_base 34: mod_base = OTHER; note = 2'-O-methyl modified nucleotide
  modified_base 35: mod_base = OTHER; note = 2'-O-methyl modified nucleotide
  modified_base 36: mod_base = OTHER; note = 2'-O-methyl modified nucleotide
  modified_base 38: mod_base = OTHER; note = 2'-O-methyl modified nucleotide
  modified_base 39: mod_base = OTHER; note = 2'-O-methyl modified nucleotide
  modified_base 40: mod_base = OTHER; note = 2'-O-methyl modified nucleotide
  modified_base 41: mod_base = OTHER; note = 2'-O-methyl modified nucleotide
  modified_base 43: mod_base = OTHER; note = 2'-O-methyl modified nucleotide
  modified_base 51: mod_base = OTHER; note = 2'-O-methyl modified nucleotide
  modified_base 52: mod_base = OTHER; note = 2'-O-methyl modified nucleotide
  modified_base 53: mod_base = OTHER; note = 2'-O-methyl modified nucleotide
  modified_base 55: mod_base = OTHER; note = 2'-O-methyl modified nucleotide
  modified_base 61: mod_base = OTHER; note = 2'-O-methyl modified nucleotide
  modified_base 62: mod_base = OTHER; note = 2'-O-methyl modified nucleotide
  modified_base 63: mod_base = OTHER; note = 2'-O-methyl modified nucleotide
tggtggtggtggttttttttttgaatttctactgttgtagatcattgagatagtgtggggaag

SEQ ID NO: 386 - RNA, 66 nt, synthetic construct
  source 1..66: mol_type = other RNA
  modified_base 25: mod_base = OTHER; note = 2'-O-methyl modified nucleotide
  modified_base 26: mod_base = OTHER; note = 2'-O-methyl modified nucleotide
  modified_base 30: mod_base = OTHER; note = 2'-O-methyl modified nucleotide
  modified_base 31: mod_base = OTHER; note = 2'-O-methyl modified nucleotide
  modified_base 33: mod_base = OTHER; note = 2'-O-methyl modified nucleotide
  modified_base 34: mod_base = OTHER; note = 2'-O-methyl modified nucleotide
  modified_base 35: mod_base = OTHER; note = 2'-O-methyl modified nucleotide
  modified_base 37: mod_base = OTHER; note = 2'-O-methyl modified nucleotide
  modified_base 38: mod_base = OTHER; note = 2'-O-methyl modified nucleotide
  modified_base 39: mod_base = OTHER; note = 2'-O-methyl modified nucleotide
  modified_base 41: mod_base = OTHER; note = 2'-O-methyl modified nucleotide
  modified_base 42: mod_base = OTHER; note = 2'-O-methyl modified nucleotide
  modified_base 43: mod_base = OTHER; note = 2'-O-methyl modified nucleotide
  modified_base 44: mod_base = OTHER; note = 2'-O-methyl modified nucleotide
  modified_base 46: mod_base = OTHER; note = 2'-O-methyl modified nucleotide
  modified_base 54: mod_base = OTHER; note = 2'-O-methyl modified nucleotide
  modified_base 55: mod_base = OTHER; note = 2'-O-methyl modified nucleotide
  modified_base 56: mod_base = OTHER; note = 2'-O-methyl modified nucleotide
  modified_base 58: mod_base = OTHER; note = 2'-O-methyl modified nucleotide
  modified_base 64: mod_base = OTHER; note = 2'-O-methyl modified nucleotide
  modified_base 65: mod_base = OTHER; note = 2'-O-methyl modified nucleotide
  modified_base 66: mod_base = OTHER; note = 2'-O-methyl modified nucleotide
gggtgggagggctgggtttttttttgaatttctactgttgtagatcattgagatagtgtggggaag

SEQ ID NO: 387 - RNA, 67 nt, synthetic construct
  source 1..67: mol_type = other RNA
  modified_base 26: mod_base = OTHER; note = 2'-O-methyl modified nucleotide
  modified_base 27: mod_base = OTHER; note = 2'-O-methyl modified nucleotide
  modified_base 31: mod_base = OTHER; note = 2'-O-methyl modified nucleotide
  modified_base 32: mod_base = OTHER; note = 2'-O-methyl modified nucleotide
  modified_base 34: mod_base = OTHER; note = 2'-O-methyl modified nucleotide
  modified_base 35: mod_base = OTHER; note = 2'-O-methyl modified nucleotide
  modified_base 36: mod_base = OTHER; note = 2'-O-methyl modified nucleotide
  modified_base 38: mod_base = OTHER; note = 2'-O-methyl modified nucleotide
  modified_base 39: mod_base = OTHER; note = 2'-O-methyl modified nucleotide
  modified_base 40: mod_base = OTHER; note = 2'-O-methyl modified nucleotide
  modified_base 42: mod_base = OTHER; note = 2'-O-methyl modified nucleotide
  modified_base 43: mod_base = OTHER; note = 2'-O-methyl modified nucleotide
  modified_base 44: mod_base = OTHER; note = 2'-O-methyl modified nucleotide
  modified_base 45: mod_base = OTHER; note = 2'-O-methyl modified nucleotide
  modified_base 47: mod_base = OTHER; note = 2'-O-methyl modified nucleotide
  modified_base 55: mod_base = OTHER; note = 2'-O-methyl modified nucleotide
  modified_base 56: mod_base = OTHER; note = 2'-O-methyl modified nucleotide
  modified_base 57: mod_base = OTHER; note = 2'-O-methyl modified nucleotide
  modified_base 59: mod_base = OTHER; note = 2'-O-methyl modified nucleotide
  modified_base 65: mod_base = OTHER; note = 2'-O-methyl modified nucleotide
  modified_base 66: mod_base = OTHER; note = 2'-O-methyl modified nucleotide
  modified_base 67: mod_base = OTHER; note = 2'-O-methyl modified nucleotide
gggtgggctgggaagggtttttttttgaatttctactgttgtagatcattgagatagtgtggggaag

SEQ ID NO: 388 - RNA, 67 nt, synthetic construct
  source 1..67: mol_type = other RNA
  modified_base 26: mod_base = OTHER; note = 2'-O-methyl modified nucleotide
  modified_base 27: mod_base = OTHER; note = 2'-O-methyl modified nucleotide
  modified_base 31: mod_base = OTHER; note = 2'-O-methyl modified nucleotide
  modified_base 32: mod_base = OTHER; note = 2'-O-methyl modified nucleotide
  modified_base 34: mod_base = OTHER; note = 2'-O-methyl modified nucleotide
  modified_base 35: mod_base = OTHER; note = 2'-O-methyl modified nucleotide
  modified_base 36: mod_base = OTHER; note = 2'-O-methyl modified nucleotide
  modified_base 38: mod_base = OTHER; note = 2'-O-methyl modified nucleotide
  modified_base 39: mod_base = OTHER; note = 2'-O-methyl modified nucleotide
  modified_base 40: mod_base = OTHER; note = 2'-O-methyl modified nucleotide
  modified_base 42: mod_base = OTHER; note = 2'-O-methyl modified nucleotide
  modified_base 43: mod_base = OTHER; note = 2'-O-methyl modified nucleotide
  modified_base 44: mod_base = OTHER; note = 2'-O-methyl modified nucleotide
  modified_base 45: mod_base = OTHER; note = 2'-O-methyl modified nucleotide
  modified_base 47: mod_base = OTHER; note = 2'-O-methyl modified nucleotide
  modified_base 55: mod_base = OTHER; note = 2'-O-methyl modified nucleotide
  modified_base 56: mod_base = OTHER; note = 2'-O-methyl modified nucleotide
  modified_base 57: mod_base = OTHER; note = 2'-O-methyl modified nucleotide
  modified_base 59: mod_base = OTHER; note = 2'-O-methyl modified nucleotide
  modified_base 65: mod_base = OTHER; note = 2'-O-methyl modified nucleotide
  modified_base 66: mod_base = OTHER; note = 2'-O-methyl modified nucleotide
  modified_base 67: mod_base = OTHER; note = 2'-O-methyl modified nucleotide
gggagggagggctagggtttttttttgaatttctactgttgtagatcattgagatagtgtggggaag

SEQ ID NO: 389 - RNA, 67 nt, synthetic construct
  source 1..67: mol_type = other RNA
  modified_base 26: mod_base = OTHER; note = 2'-O-methyl modified nucleotide
  modified_base 27: mod_base = OTHER; note = 2'-O-methyl modified nucleotide
  modified_base 31: mod_base = OTHER; note = 2'-O-methyl modified nucleotide
  modified_base 32: mod_base = OTHER; note = 2'-O-methyl modified nucleotide
  modified_base 34: mod_base = OTHER; note = 2'-O-methyl modified nucleotide
  modified_base 35: mod_base = OTHER; note = 2'-O-methyl modified nucleotide
  modified_base 36: mod_base = OTHER; note = 2'-O-methyl modified nucleotide
  modified_base 38: mod_base = OTHER; note = 2'-O-methyl modified nucleotide
  modified_base 39: mod_base = OTHER; note = 2'-O-methyl modified nucleotide
  modified_base 40: mod_base = OTHER; note = 2'-O-methyl modified nucleotide
  modified_base 42: mod_base = OTHER; note = 2'-O-methyl modified nucleotide
  modified_base 43: mod_base = OTHER; note = 2'-O-methyl modified nucleotide
  modified_base 44: mod_base = OTHER; note = 2'-O-methyl modified nucleotide
  modified_base 45: mod_base = OTHER; note = 2'-O-methyl modified nucleotide
  modified_base 47: mod_base = OTHER; note = 2'-O-methyl modified nucleotide
  modified_base 55: mod_base = OTHER; note = 2'-O-methyl modified nucleotide
  modified_base 56: mod_base = OTHER; note = 2'-O-methyl modified nucleotide
  modified_base 57: mod_base = OTHER; note = 2'-O-methyl modified nucleotide
  modified_base 59: mod_base = OTHER; note = 2'-O-methyl modified nucleotide
  modified_base 65: mod_base = OTHER; note = 2'-O-methyl modified nucleotide
  modified_base 66: mod_base = OTHER; note = 2'-O-methyl modified nucleotide
  modified_base 67: mod_base = OTHER; note = 2'-O-methyl modified nucleotide
gggcagggctgggagggtttttttttgaatttctactgttgtagatcattgagatagtgtggggaag

SEQ ID NO: 390 - RNA, 68 nt, synthetic construct
  source 1..68: mol_type = other RNA
  modified_base 27: mod_base = OTHER; note = 2'-O-methyl modified nucleotide
  modified_base 28: mod_base = OTHER; note = 2'-O-methyl modified nucleotide
  modified_base 32: mod_base = OTHER; note = 2'-O-methyl modified nucleotide
  modified_base 33: mod_base = OTHER; note = 2'-O-methyl modified nucleotide
  modified_base 35: mod_base = OTHER; note = 2'-O-methyl modified nucleotide
  modified_base 36: mod_base = OTHER; note = 2'-O-methyl modified nucleotide
  modified_base 37: mod_base = OTHER; note = 2'-O-methyl modified nucleotide
  modified_base 39: mod_base = OTHER; note = 2'-O-methyl modified nucleotide
  modified_base 40: mod_base = OTHER; note = 2'-O-methyl modified nucleotide
  modified_base 41: mod_base = OTHER; note = 2'-O-methyl modified nucleotide
  modified_base 43: mod_base = OTHER; note = 2'-O-methyl modified nucleotide
  modified_base 44: mod_base = OTHER; note = 2'-O-methyl modified nucleotide
  modified_base 45: mod_base = OTHER; note = 2'-O-methyl modified nucleotide
  modified_base 46: mod_base = OTHER; note = 2'-O-methyl modified nucleotide
  modified_base 48: mod_base = OTHER; note = 2'-O-methyl modified nucleotide
  modified_base 56: mod_base = OTHER; note = 2'-O-methyl modified nucleotide
  modified_base 57: mod_base = OTHER; note = 2'-O-methyl modified nucleotide
  modified_base 58: mod_base = OTHER; note = 2'-O-methyl modified nucleotide
  modified_base 60: mod_base = OTHER; note = 2'-O-methyl modified nucleotide
  modified_base 66: mod_base = OTHER; note = 2'-O-methyl modified nucleotide
  modified_base 67: mod_base = OTHER; note = 2'-O-methyl modified nucleotide
  modified_base 68: mod_base = OTHER; note = 2'-O-methyl modified nucleotide
gggctgggctgggcagggtttttttttgaatttctactgttgtagatcattgagatagtgtggggaag

SEQ ID NO: 391 - RNA, 92 nt, synthetic construct
  source 1..92: mol_type = other RNA
  modified_base 51: mod_base = OTHER; note = 2'-O-methyl modified nucleotide
  modified_base 52: mod_base = OTHER; note = 2'-O-methyl modified nucleotide
  modified_base 56: mod_base = OTHER; note = 2'-O-methyl modified nucleotide
  modified_base 57: mod_base = OTHER; note = 2'-O-methyl modified nucleotide
  modified_base 59: mod_base = OTHER; note = 2'-O-methyl modified nucleotide
  modified_base 60: mod_base = OTHER; note = 2'-O-methyl modified nucleotide
  modified_base 61: mod_base = OTHER; note = 2'-O-methyl modified nucleotide
  modified_base 63: mod_base = OTHER; note = 2'-O-methyl modified nucleotide
  modified_base 64: mod_base = OTHER; note = 2'-O-methyl modified nucleotide
  modified_base 65: mod_base = OTHER; note = 2'-O-methyl modified nucleotide
  modified_base 67: mod_base = OTHER; note = 2'-O-methyl modified nucleotide
  modified_base 68: mod_base = OTHER; note = 2'-O-methyl modified nucleotide
  modified_base 69: mod_base = OTHER; note = 2'-O-methyl modified nucleotide
  modified_base 70: mod_base = OTHER; note = 2'-O-methyl modified nucleotide
  modified_base 72: mod_base = OTHER; note = 2'-O-methyl modified nucleotide
  modified_base 80: mod_base = OTHER; note = 2'-O-methyl modified nucleotide
  modified_base 81: mod_base = OTHER; note = 2'-O-methyl modified nucleotide
  modified_base 82: mod_base = OTHER; note = 2'-O-methyl modified nucleotide
  modified_base 84: mod_base = OTHER; note = 2'-O-methyl modified nucleotide
  modified_base 90: mod_base = OTHER; note = 2'-O-methyl modified nucleotide
  modified_base 91: mod_base = OTHER; note = 2'-O-methyl modified nucleotide
  modified_base 92: mod_base = OTHER; note = 2'-O-methyl modified nucleotide
ttgacgcggttctatctagttacgcgttaaaccaactagaaatttttttttgaatttctactgttgtagatcattgagatagtgtggggaag

SEQ ID NO: 392 - RNA, 75 nt, synthetic construct
  source 1..75: mol_type = other RNA
  modified_base 34: mod_base = OTHER; note = 2'-O-methyl modified nucleotide
  modified_base 35: mod_base = OTHER; note = 2'-O-methyl modified nucleotide
  modified_base 39: mod_base = OTHER; note = 2'-O-methyl modified nucleotide
  modified_base 40: mod_base = OTHER; note = 2'-O-methyl modified nucleotide
  modified_base 42: mod_base = OTHER; note = 2'-O-methyl modified nucleotide
  modified_base 43: mod_base = OTHER; note = 2'-O-methyl modified nucleotide
  modified_base 44: mod_base = OTHER; note = 2'-O-methyl modified nucleotide
  modified_base 46: mod_base = OTHER; note = 2'-O-methyl modified nucleotide
  modified_base 47: mod_base = OTHER; note = 2'-O-methyl modified nucleotide
  modified_base 48: mod_base = OTHER; note = 2'-O-methyl modified nucleotide
  modified_base 50: mod_base = OTHER; note = 2'-O-methyl modified nucleotide
  modified_base 51: mod_base = OTHER; note = 2'-O-methyl modified nucleotide
  modified_base 52: mod_base = OTHER; note = 2'-O-methyl modified nucleotide
  modified_base 53: mod_base = OTHER; note = 2'-O-methyl modified nucleotide
  modified_base 55: mod_base = OTHER; note = 2'-O-methyl modified nucleotide
  modified_base 63: mod_base = OTHER; note = 2'-O-methyl modified nucleotide
  modified_base 64: mod_base = OTHER; note = 2'-O-methyl modified nucleotide
  modified_base 65: mod_base = OTHER; note = 2'-O-methyl modified nucleotide
  modified_base 67: mod_base = OTHER; note = 2'-O-methyl modified nucleotide
  modified_base 73: mod_base = OTHER; note = 2'-O-methyl modified nucleotide
  modified_base 74: mod_base = OTHER; note = 2'-O-methyl modified nucleotide
  modified_base 75: mod_base = OTHER; note = 2'-O-methyl modified nucleotide
ggagcagacgatatggcgtcgctcctttttttttgaatttctactgttgtagatcattgagatagtgtggggaag

SEQ ID NO: 393 - RNA, 58 nt, synthetic construct
  source 1..58: mol_type = other RNA
  modified_base 9: mod_base = OTHER; note = 2'-O-methyl modified nucleotide
  modified_base 10: mod_base = OTHER; note = 2'-O-methyl modified nucleotide
  modified_base 14: mod_base = OTHER; note = 2'-O-methyl modified nucleotide
  modified_base 15: mod_base = OTHER; note = 2'-O-methyl modified nucleotide
  modified_base 17: mod_base = OTHER; note = 2'-O-methyl modified nucleotide
  modified_base 18: mod_base = OTHER; note = 2'-O-methyl modified nucleotide
  modified_base 19: mod_base = OTHER; note = 2'-O-methyl modified nucleotide
  modified_base 21: mod_base = OTHER; note = 2'-O-methyl modified nucleotide
  modified_base 22: mod_base = OTHER; note = 2'-O-methyl modified nucleotide
  modified_base 23: mod_base = OTHER; note = 2'-O-methyl modified nucleotide
  modified_base 25: mod_base = OTHER; note = 2'-O-methyl modified nucleotide
  modified_base 26: mod_base = OTHER; note = 2'-O-methyl modified nucleotide
  modified_base 27: mod_base = OTHER; note = 2'-O-methyl modified nucleotide
  modified_base 28: mod_base = OTHER; note = 2'-O-methyl modified nucleotide
  modified_base 30: mod_base = OTHER; note = 2'-O-methyl modified nucleotide
  modified_base 38: mod_base = OTHER; note = 2'-O-methyl modified nucleotide
  modified_base 39: mod_base = OTHER; note = 2'-O-methyl modified nucleotide
  modified_base 40: mod_base = OTHER; note = 2'-O-methyl modified nucleotide
  modified_base 42: mod_base = OTHER; note = 2'-O-methyl modified nucleotide
  modified_base 48: mod_base = OTHER; note = 2'-O-methyl modified nucleotide
  modified_base 49: mod_base = OTHER; note = 2'-O-methyl modified nucleotide
  modified_base 50: mod_base = OTHER; note = 2'-O-methyl modified nucleotide
tttttttttgaatttctactgttgtagatcattgagatagtgtggggaagtttttttt

SEQ ID NO: 394 - RNA, 63 nt, synthetic construct
  source 1..63: mol_type = other RNA
  modified_base 1: mod_base = OTHER; note = 2'-O-methyl modified nucleotide
  modified_base 2: mod_base = OTHER; note = 2'-O-methyl modified nucleotide
  modified_base 6: mod_base = OTHER; note = 2'-O-methyl modified nucleotide
  modified_base 7: mod_base = OTHER; note = 2'-O-methyl modified nucleotide
  modified_base 9: mod_base = OTHER; note = 2'-O-methyl modified nucleotide
  modified_base 10: mod_base = OTHER; note = 2'-O-methyl modified nucleotide
  modified_base 11: mod_base = OTHER; note = 2'-O-methyl modified nucleotide
  modified_base 13: mod_base = OTHER; note = 2'-O-methyl modified nucleotide
  modified_base 14: mod_base = OTHER; note = 2'-O-methyl modified nucleotide
  modified_base 15: mod_base = OTHER; note = 2'-O-methyl modified nucleotide
  modified_base 17: mod_base = OTHER; note = 2'-O-methyl modified nucleotide
  modified_base 18: mod_base = OTHER; note = 2'-O-methyl modified nucleotide
  modified_base 19: mod_base = OTHER; note = 2'-O-methyl modified nucleotide
  modified_base 20: mod_base = OTHER; note = 2'-O-methyl modified nucleotide
  modified_base 22: mod_base = OTHER; note = 2'-O-methyl modified nucleotide
  modified_base 30: mod_base = OTHER; note = 2'-O-methyl modified nucleotide
  modified_base 31: mod_base = OTHER; note = 2'-O-methyl modified nucleotide
  modified_base 32: mod_base = OTHER; note = 2'-O-methyl modified nucleotide
  modified_base 34: mod_base = OTHER; note = 2'-O-methyl modified nucleotide
  modified_base 40: mod_base = OTHER; note = 2'-O-methyl modified nucleotide
  modified_base 41: mod_base = OTHER; note = 2'-O-methyl modified nucleotide
  modified_base 42: mod_base = OTHER; note = 2'-O-methyl modified nucleotide
tgaatttctactgttgtagatcattgagatagtgtggggaagtttttttttggtggtggtggt

SEQ ID NO: 395 - RNA, 66 nt, synthetic construct
  source 1..66: mol_type = other RNA
  modified_base 1: mod_base = OTHER; note = 2'-O-methyl modified nucleotide
  modified_base 2: mod_base = OTHER; note = 2'-O-methyl modified nucleotide
  modified_base 6: mod_base = OTHER; note = 2'-O-methyl modified nucleotide
  modified_base 7: mod_base = OTHER; note = 2'-O-methyl modified nucleotide
  modified_base 9: mod_base = OTHER; note = 2'-O-methyl modified nucleotide
  modified_base 10: mod_base = OTHER; note = 2'-O-methyl modified nucleotide
  modified_base 11: mod_base = OTHER; note = 2'-O-methyl modified nucleotide
  modified_base 13: mod_base = OTHER; note = 2'-O-methyl modified nucleotide
  modified_base 14: mod_base = OTHER; note = 2'-O-methyl modified nucleotide
  modified_base 15: mod_base = OTHER; note = 2'-O-methyl modified nucleotide
  modified_base 17: mod_base = OTHER; note = 2'-O-methyl modified nucleotide
  modified_base 18: mod_base = OTHER; note = 2'-O-methyl modified nucleotide
  modified_base 19: mod_base = OTHER; note = 2'-O-methyl modified nucleotide
  modified_base 20: mod_base = OTHER; note = 2'-O-methyl modified nucleotide
  modified_base 22: mod_base = OTHER; note = 2'-O-methyl modified nucleotide
  modified_base 30: mod_base = OTHER; note = 2'-O-methyl modified nucleotide
  modified_base 31: mod_base = OTHER; note = 2'-O-methyl modified nucleotide
  modified_base 32: mod_base = OTHER; note = 2'-O-methyl modified nucleotide
  modified_base 34: mod_base = OTHER; note = 2'-O-methyl modified nucleotide
  modified_base 40: mod_base = OTHER; note = 2'-O-methyl modified nucleotide
  modified_base 41: mod_base = OTHER; note = 2'-O-methyl modified nucleotide
  modified_base 42: mod_base = OTHER; note = 2'-O-methyl modified nucleotide
tgaatttctactgttgtagatcattgagatagtgtggggaagttttttttgggtgggagggctggg

SEQ ID NO: 396 - RNA, 67 nt, synthetic construct
  source 1..67: mol_type = other RNA
  modified_base 1: mod_base = OTHER; note = 2'-O-methyl modified nucleotide
  modified_base 2: mod_base = OTHER; note = 2'-O-methyl modified nucleotide
  modified_base 6: mod_base = OTHER; note = 2'-O-methyl modified nucleotide
  modified_base 7: mod_base = OTHER; note = 2'-O-methyl modified nucleotide
  modified_base 9: mod_base = OTHER; note = 2'-O-methyl modified nucleotide
  modified_base 10: mod_base = OTHER; note = 2'-O-methyl modified nucleotide
  modified_base 11: mod_base = OTHER; note = 2'-O-methyl modified nucleotide
  modified_base 13: mod_base = OTHER; note = 2'-O-methyl modified nucleotide
  modified_base 14: mod_base = OTHER; note = 2'-O-methyl modified nucleotide
  modified_base 15: mod_base = OTHER; note = 2'-O-methyl modified nucleotide
  modified_base 17: mod_base = OTHER; note = 2'-O-methyl modified nucleotide
  modified_base 18: mod_base = OTHER; note = 2'-O-methyl modified nucleotide
  modified_base 19: mod_base = OTHER; note = 2'-O-methyl modified nucleotide
  modified_base 20: mod_base = OTHER; note = 2'-O-methyl modified nucleotide
  modified_base 22: mod_base = OTHER; note = 2'-O-methyl modified nucleotide
  modified_base 30: mod_base = OTHER; note = 2'-O-methyl modified nucleotide
  modified_base 31: mod_base = OTHER; note = 2'-O-methyl modified nucleotide
  modified_base 32: mod_base = OTHER; note = 2'-O-methyl modified nucleotide
  modified_base 34: mod_base = OTHER; note = 2'-O-methyl modified nucleotide
  modified_base 40: mod_base = OTHER; note = 2'-O-methyl modified nucleotide
  modified_base 41: mod_base = OTHER; note = 2'-O-methyl modified nucleotide
  modified_base 42: mod_base = OTHER; note = 2'-O-methyl modified nucleotide
tgaatttctactgttgtagatcattgagatagtgtggggaagttttttttgggtgggctgggaaggg

SEQ ID NO: 397 - RNA, 67 nt, synthetic construct
  source 1..67: mol_type = other RNA
  modified_base 1: mod_base = OTHER; note = 2'-O-methyl modified nucleotide
  modified_base 2: mod_base = OTHER; note = 2'-O-methyl modified nucleotide
  modified_base 6: mod_base = OTHER; note = 2'-O-methyl modified nucleotide
  modified_base 7: mod_base = OTHER; note = 2'-O-methyl modified nucleotide
  modified_base 9: mod_base = OTHER; note = 2'-O-methyl modified nucleotide
  modified_base 10: mod_base = OTHER; note = 2'-O-methyl modified nucleotide
  modified_base 11: mod_base = OTHER; note = 2'-O-methyl modified nucleotide
  modified_base 13: mod_base = OTHER; note = 2'-O-methyl modified nucleotide
  modified_base 14: mod_base = OTHER; note = 2'-O-methyl modified nucleotide
  modified_base 15: mod_base = OTHER; note = 2'-O-methyl modified nucleotide
  modified_base 17: mod_base = OTHER; note = 2'-O-methyl modified nucleotide
  modified_base 18: mod_base = OTHER; note = 2'-O-methyl modified nucleotide
  modified_base 19: mod_base = OTHER; note = 2'-O-methyl modified nucleotide
  modified_base 20: mod_base = OTHER; note = 2'-O-methyl modified nucleotide
  modified_base 22: mod_base = OTHER; note = 2'-O-methyl modified nucleotide
  modified_base 30: mod_base = OTHER; note = 2'-O-methyl modified nucleotide
  modified_base 31: mod_base = OTHER; note = 2'-O-methyl modified nucleotide
  modified_base 32: mod_base = OTHER; note = 2'-O-methyl modified nucleotide
  modified_base 34: mod_base = OTHER; note = 2'-O-methyl modified nucleotide
  modified_base 40: mod_base = OTHER; note = 2'-O-methyl modified nucleotide
  modified_base 41: mod_base = OTHER; note = 2'-O-methyl modified nucleotide
  modified_base 42: mod_base = OTHER; note = 2'-O-methyl modified nucleotide
tgaatttctactgttgtagatcattgagatagtgtggggaagttttttttgggagggagggctaggg

SEQ ID NO: 398 - RNA, 67 nt, synthetic construct
  source 1..67: mol_type = other RNA
  modified_base 1: mod_base = OTHER; note = 2'-O-methyl modified nucleotide
  modified_base 2: mod_base = OTHER; note = 2'-O-methyl modified nucleotide
  modified_base 6: mod_base = OTHER; note = 2'-O-methyl modified nucleotide
  modified_base 7: mod_base = OTHER; note = 2'-O-methyl modified nucleotide
  modified_base 9: mod_base = OTHER; note = 2'-O-methyl modified nucleotide
  modified_base 10: mod_base = OTHER; note = 2'-O-methyl modified nucleotide
  modified_base 11: mod_base = OTHER; note = 2'-O-methyl modified nucleotide
  modified_base 13: mod_base = OTHER; note = 2'-O-methyl modified nucleotide
  modified_base 14: mod_base = OTHER; note = 2'-O-methyl modified nucleotide
  modified_base 15: mod_base = OTHER; note = 2'-O-methyl modified nucleotide
  modified_base 17: mod_base = OTHER; note = 2'-O-methyl modified nucleotide
  modified_base 18: mod_base = OTHER; note = 2'-O-methyl modified nucleotide
  modified_base 19: mod_base = OTHER; note = 2'-O-methyl modified nucleotide
  modified_base 20: mod_base = OTHER; note = 2'-O-methyl modified nucleotide
  modified_base 22: mod_base = OTHER; note = 2'-O-methyl modified nucleotide
  modified_base 30: mod_base = OTHER; note = 2'-O-methyl modified nucleotide
  modified_base 31: mod_base = OTHER; note = 2'-O-methyl modified nucleotide
  modified_base 32: mod_base = OTHER; note = 2'-O-methyl modified nucleotide
  modified_base 34: mod_base = OTHER; note = 2'-O-methyl modified nucleotide
  modified_base 40: mod_base = OTHER; note = 2'-O-methyl modified nucleotide
  modified_base 41: mod_base = OTHER; note = 2'-O-methyl modified nucleotide
  modified_base 42: mod_base = OTHER; note = 2'-O-methyl modified nucleotide
tgaatttctactgttgtagatcattgagatagtgtggggaagttttttttgggcagggctgggaggg

SEQ ID NO: 399 - RNA, 68 nt, synthetic construct
  source 1..68: mol_type = other RNA
  modified_base 1: mod_base = OTHER; note = 2'-O-methyl modified nucleotide
  modified_base 2: mod_base = OTHER; note = 2'-O-methyl modified nucleotide
  modified_base 6: mod_base = OTHER; note = 2'-O-methyl modified nucleotide
  modified_base 7: mod_base = OTHER; note = 2'-O-methyl modified nucleotide
  modified_base 9: mod_base = OTHER; note = 2'-O-methyl modified nucleotide
  modified_base 10: mod_base = OTHER; note = 2'-O-methyl modified nucleotide
  modified_base 11: mod_base = OTHER; note = 2'-O-methyl modified nucleotide
  modified_base 13: mod_base = OTHER; note = 2'-O-methyl modified nucleotide
  modified_base 14: mod_base = OTHER; note = 2'-O-methyl modified nucleotide
  modified_base 15: mod_base = OTHER; note = 2'-O-methyl modified nucleotide
  modified_base 17: mod_base = OTHER; note = 2'-O-methyl modified nucleotide
  modified_base 18: mod_base = OTHER; note = 2'-O-methyl modified nucleotide
  modified_base 19: mod_base = OTHER; note = 2'-O-methyl modified nucleotide
  modified_base 20: mod_base = OTHER; note = 2'-O-methyl modified nucleotide
  modified_base 22: mod_base = OTHER; note = 2'-O-methyl modified nucleotide
  modified_base 30: mod_base = OTHER; note = 2'-O-methyl modified nucleotide
  modified_base 31: mod_base = OTHER; note = 2'-O-methyl modified nucleotide
  modified_base 32: mod_base = OTHER; note = 2'-O-methyl modified nucleotide
  modified_base 34: mod_base = OTHER; note = 2'-O-methyl modified nucleotide
  modified_base 40: mod_base = OTHER; note = 2'-O-methyl modified nucleotide
  modified_base 41: mod_base = OTHER; note = 2'-O-methyl modified nucleotide
  modified_base 42: mod_base = OTHER; note = 2'-O-methyl modified nucleotide
tgaatttctactgttgtagatcattgagatagtgtggggaagttttttttgggctgggctgggcaggg

SEQ ID NO: 400 - RNA, 92 nt, synthetic construct
  source 1..92: mol_type = other RNA
  modified_base 1: mod_base = OTHER; note = 2'-O-methyl modified nucleotide
  modified_base 2: mod_base = OTHER; note = 2'-O-methyl modified nucleotide
  modified_base 6: mod_base = OTHER; note = 2'-O-methyl modified nucleotide
  modified_base 7: mod_base = OTHER; note = 2'-O-methyl modified nucleotide
  modified_base 9: mod_base = OTHER; note = 2'-O-methyl modified nucleotide
  modified_base 10: mod_base = OTHER; note = 2'-O-methyl modified nucleotide
  modified_base 11: mod_base = OTHER; note = 2'-O-methyl modified nucleotide
  modified_base 13: mod_base = OTHER; note = 2'-O-methyl modified nucleotide
  modified_base 14: mod_base = OTHER; note = 2'-O-methyl modified nucleotide
  modified_base 15: mod_base = OTHER; note = 2'-O-methyl modified nucleotide
  modified_base 17: mod_base = OTHER; note = 2'-O-methyl modified nucleotide
  modified_base 18: mod_base = OTHER; note = 2'-O-methyl modified nucleotide
  modified_base 19: mod_base = OTHER; note = 2'-O-methyl modified nucleotide
  modified_base 20: mod_base = OTHER; note = 2'-O-methyl modified nucleotide
  modified_base 22: mod_base = OTHER; note = 2'-O-methyl modified nucleotide
  modified_base 30: mod_base = OTHER; note = 2'-O-methyl modified nucleotide
  modified_base 31: mod_base = OTHER; note = 2'-O-methyl modified nucleotide
  modified_base 32: mod_base = OTHER; note = 2'-O-methyl modified nucleotide
  modified_base 34: mod_base = OTHER; note = 2'-O-methyl modified nucleotide
  modified_base 40: mod_base = OTHER; note = 2'-O-methyl modified nucleotide
  modified_base 41: mod_base = OTHER; note = 2'-O-methyl modified nucleotide
  modified_base 42: mod_base = OTHER; note = 2'-O-methyl modified nucleotide
tgaatttctactgttgtagatcattgagatagtgtggggaagttttttttttgacgcggttctatctagttacgcgttaaaccaactagaaa

SEQ ID NO: 401 - RNA, 75 nt, synthetic construct
  source 1..75: mol_type = other RNA
  modified_base 1: mod_base = OTHER; note = 2'-O-methyl modified nucleotide
  modified_base 2: mod_base = OTHER; note = 2'-O-methyl modified nucleotide
  modified_base 6: mod_base = OTHER; note = 2'-O-methyl modified nucleotide
  modified_base 7: mod_base = OTHER; note = 2'-O-methyl modified nucleotide
  modified_base 9: mod_base = OTHER; note = 2'-O-methyl modified nucleotide
  modified_base 10: mod_base = OTHER; note = 2'-O-methyl modified nucleotide
  modified_base 11: mod_base = OTHER; note = 2'-O-methyl modified nucleotide
  modified_base 13: mod_base = OTHER; note = 2'-O-methyl modified nucleotide
  modified_base 14: mod_base = OTHER; note = 2'-O-methyl modified nucleotide
  modified_base 15: mod_base = OTHER; note = 2'-O-methyl modified nucleotide
  modified_base 17: mod_base = OTHER; note = 2'-O-methyl modified nucleotide
  modified_base 18: mod_base = OTHER; note = 2'-O-methyl modified nucleotide
  modified_base 19: mod_base = OTHER; note = 2'-O-methyl modified nucleotide
  modified_base 20: mod_base = OTHER; note = 2'-O-methyl modified nucleotide
  modified_base 22: mod_base = OTHER; note = 2'-O-methyl modified nucleotide
  modified_base 30: mod_base = OTHER; note = 2'-O-methyl modified nucleotide
  modified_base 31: mod_base = OTHER; note = 2'-O-methyl modified nucleotide
  modified_base 32: mod_base = OTHER; note = 2'-O-methyl modified nucleotide
  modified_base 34: mod_base = OTHER; note = 2'-O-methyl modified nucleotide
  modified_base 40: mod_base = OTHER; note = 2'-O-methyl modified nucleotide
  modified_base 41: mod_base = OTHER; note = 2'-O-methyl modified nucleotide
  modified_base 42: mod_base = OTHER; note = 2'-O-methyl modified nucleotide
tgaatttctactgttgtagatcattgagatagtgtggggaagttttttttggagcagacgatatggcgtcgctcc

SEQ ID NO: 402 - RNA, 50 nt, synthetic construct
  source 1..50: mol_type = other RNA
  modified_base 9: mod_base = OTHER; note = 2'-O-methyl modified nucleotide
  modified_base 10: mod_base = OTHER; note = 2'-O-methyl modified nucleotide
  modified_base 14: mod_base = OTHER; note = 2'-O-methyl modified nucleotide
  modified_base 15: mod_base = OTHER; note = 2'-O-methyl modified nucleotide
  modified_base 17: mod_base = OTHER; note = 2'-O-methyl modified nucleotide
  modified_base 18: mod_base = OTHER; note = 2'-O-methyl modified nucleotide
  modified_base 19: mod_base = OTHER; note = 2'-O-methyl modified nucleotide
  modified_base 21: mod_base = OTHER; note = 2'-O-methyl modified nucleotide
  modified_base 22: mod_base = OTHER; note = 2'-O-methyl modified nucleotide
  modified_base 23: mod_base = OTHER; note = 2'-O-methyl modified nucleotide
  modified_base 25: mod_base = OTHER; note = 2'-O-methyl modified nucleotide
  modified_base 26: mod_base = OTHER; note = 2'-O-methyl modified nucleotide
  modified_base 27: mod_base = OTHER; note = 2'-O-methyl modified nucleotide
  modified_base 28: mod_base = OTHER; note = 2'-O-methyl modified nucleotide
  modified_base 30: mod_base = OTHER; note = 2'-O-methyl modified nucleotide
  modified_base 37: mod_base = OTHER; note = 2'-O-methyl modified nucleotide
  modified_base 38: mod_base = OTHER; note = 2'-O-methyl modified nucleotide
  modified_base 39: mod_base = OTHER; note = 2'-O-methyl modified nucleotide
  modified_base 40: mod_base = OTHER; note = 2'-O-methyl modified nucleotide
  modified_base 42: mod_base = OTHER; note = 2'-O-methyl modified nucleotide
  modified_base 48: mod_base = OTHER; note = 2'-O-methyl modified nucleotide
  modified_base 49: mod_base = OTHER; note = 2'-O-methyl modified nucleotide
  modified_base 50: mod_base = OTHER; note = 2'-O-methyl modified nucleotide
tttttttttgaatttctactgttgtagattcacaggctccaggaagggtt

SEQ ID NO: 403 - RNA, 63 nt, synthetic construct
  source 1..63: mol_type = other RNA
  modified_base 22: mod_base = OTHER; note = 2'-O-methyl modified nucleotide
  modified_base 23: mod_base = OTHER; note = 2'-O-methyl modified nucleotide
  modified_base 27: mod_base = OTHER; note = 2'-O-methyl modified nucleotide
  modified_base 28: mod_base = OTHER; note = 2'-O-methyl modified nucleotide
  modified_base 30: mod_base = OTHER; note = 2'-O-methyl modified nucleotide
  modified_base 31: mod_base = OTHER; note = 2'-O-methyl modified nucleotide
  modified_base 32: mod_base = OTHER; note = 2'-O-methyl modified nucleotide
  modified_base 34: mod_base = OTHER; note = 2'-O-methyl modified nucleotide
  modified_base 35: mod_base = OTHER; note = 2'-O-methyl modified nucleotide
  modified_base 36: mod_base = OTHER; note = 2'-O-methyl modified nucleotide
  modified_base 38: mod_base = OTHER; note = 2'-O-methyl modified nucleotide
  modified_base 39: mod_base = OTHER; note = 2'-O-methyl modified nucleotide
  modified_base 40: mod_base = OTHER; note = 2'-O-methyl modified nucleotide
  modified_base 41: mod_base = OTHER; note = 2'-O-methyl modified nucleotide
  modified_base 43: mod_base = OTHER; note = 2'-O-methyl modified nucleotide
  modified_base 50: mod_base = OTHER; note = 2'-O-methyl modified nucleotide
  modified_base 51: mod_base = OTHER; note = 2'-O-methyl modified nucleotide
  modified_base 52: mod_base = OTHER; note = 2'-O-methyl modified nucleotide
  modified_base 53: mod_base = OTHER; note = 2'-O-methyl modified nucleotide
  modified_base 55: mod_base = OTHER; note = 2'-O-methyl modified nucleotide
  modified_base 61: mod_base = OTHER; note = 2'-O-methyl modified nucleotide
  modified_base 62: mod_base = OTHER; note = 2'-O-methyl modified nucleotide
  modified_base 63: mod_base = OTHER; note = 2'-O-methyl modified nucleotide
tggtggtggtggttttttttttgaatttctactgttgtagattcacaggctccaggaagggtt

SEQ ID NO: 404 - RNA, 66 nt, synthetic construct
  source 1..66: mol_type = other RNA
  modified_base 25: mod_base = OTHER; note = 2'-O-methyl modified nucleotide
  modified_base 26: mod_base = OTHER; note = 2'-O-methyl modified nucleotide
  modified_base 30: mod_base = OTHER; note = 2'-O-methyl modified nucleotide
  modified_base 31: mod_base = OTHER; note = 2'-O-methyl modified nucleotide
  modified_base 33: mod_base = OTHER; note = 2'-O-methyl modified nucleotide
  modified_base 34: mod_base = OTHER; note = 2'-O-methyl modified nucleotide
  modified_base 35: mod_base = OTHER; note = 2'-O-methyl modified nucleotide
  modified_base 37: mod_base = OTHER; note = 2'-O-methyl modified nucleotide
  modified_base 38: mod_base = OTHER; note = 2'-O-methyl modified nucleotide
  modified_base 39: mod_base = OTHER; note = 2'-O-methyl modified nucleotide
  modified_base 41: mod_base = OTHER; note = 2'-O-methyl modified nucleotide
  modified_base 42: mod_base = OTHER; note = 2'-O-methyl modified nucleotide
  modified_base 43: mod_base = OTHER; note = 2'-O-methyl modified nucleotide
  modified_base 44: mod_base = OTHER; note = 2'-O-methyl modified nucleotide
  modified_base 46: mod_base = OTHER; note = 2'-O-methyl modified nucleotide
  modified_base 53: mod_base = OTHER; note = 2'-O-methyl modified nucleotide
  modified_base 54: mod_base = OTHER; note = 2'-O-methyl modified nucleotide
  modified_base 55: mod_base = OTHER; note = 2'-O-methyl modified nucleotide
  modified_base 56: mod_base = OTHER; note = 2'-O-methyl modified nucleotide
  modified_base 58: mod_base = OTHER; note = 2'-O-methyl modified nucleotide
  modified_base 64: mod_base = OTHER; note = 2'-O-methyl modified nucleotide
  modified_base 65: mod_base = OTHER; note = 2'-O-methyl modified nucleotide
  modified_base 66: mod_base = OTHER; note = 2'-O-methyl modified nucleotide
gggtgggagggctgggtttttttttgaatttctactgttgtagattcacaggctccaggaagggtt

SEQ ID NO: 405 - RNA, 67 nt, synthetic construct
  source 1..67: mol_type = other RNA
  modified_base 26: mod_base = OTHER; note = 2'-O-methyl modified nucleotide
  modified_base 27: mod_base = OTHER; note = 2'-O-methyl modified nucleotide
  modified_base 31: mod_base = OTHER; note = 2'-O-methyl modified nucleotide
  modified_base 32: mod_base = OTHER; note = 2'-O-methyl modified nucleotide
  modified_base 34: mod_base = OTHER; note = 2'-O-methyl modified nucleotide
  modified_base 35: mod_base = OTHER; note = 2'-O-methyl modified nucleotide
  modified_base 36: mod_base = OTHER; note = 2'-O-methyl modified nucleotide
  modified_base 38: mod_base = OTHER; note = 2'-O-methyl modified nucleotide
  modified_base 39: mod_base = OTHER; note = 2'-O-methyl modified nucleotide
  modified_base 40: mod_base = OTHER; note = 2'-O-methyl modified nucleotide
  modified_base 42: mod_base = OTHER; note = 2'-O-methyl modified nucleotide
  modified_base 43: mod_base = OTHER; note = 2'-O-methyl modified nucleotide
  modified_base 44: mod_base = OTHER; note = 2'-O-methyl modified nucleotide
  modified_base 45: mod_base = OTHER; note = 2'-O-methyl modified nucleotide
  modified_base 47: mod_base = OTHER; note = 2'-O-methyl modified nucleotide
  modified_base 54: mod_base = OTHER; note = 2'-O-methyl modified nucleotide
  modified_base 55: mod_base = OTHER; note = 2'-O-methyl modified nucleotide
  modified_base 56: mod_base = OTHER; note = 2'-O-methyl modified nucleotide
  modified_base 57: mod_base = OTHER; note = 2'-O-methyl modified nucleotide
  modified_base 59: mod_base = OTHER; note = 2'-O-methyl modified nucleotide
  modified_base 65: mod_base = OTHER; note = 2'-O-methyl modified nucleotide
  modified_base 66: mod_base = OTHER; note = 2'-O-methyl modified nucleotide
  modified_base 67: mod_base = OTHER; note = 2'-O-methyl modified nucleotide
gggtgggctgggaagggtttttttttgaatttctactgttgtagattcacaggctccaggaagggtt

SEQ ID NO: 406 - RNA, 67 nt, synthetic construct
  source 1..67: mol_type = other RNA
  modified_base 26: mod_base = OTHER; note = 2'-O-methyl modified nucleotide
  modified_base 27: mod_base = OTHER; note = 2'-O-methyl modified nucleotide
  modified_base 31: mod_base = OTHER; note = 2'-O-methyl modified nucleotide
  modified_base 32: mod_base = OTHER; note = 2'-O-methyl modified nucleotide
  modified_base 34: mod_base = OTHER; note = 2'-O-methyl modified nucleotide
  modified_base 35: mod_base = OTHER; note = 2'-O-methyl modified nucleotide
  modified_base 36: mod_base = OTHER; note = 2'-O-methyl modified nucleotide
  modified_base 38: mod_base = OTHER; note = 2'-O-methyl modified nucleotide
  modified_base 39: mod_base = OTHER; note = 2'-O-methyl modified nucleotide
  modified_base 40: mod_base = OTHER; note = 2'-O-methyl modified nucleotide
  modified_base 42: mod_base = OTHER; note = 2'-O-methyl modified nucleotide
  modified_base 43: mod_base = OTHER; note = 2'-O-methyl modified nucleotide
  modified_base 44: mod_base = OTHER; note = 2'-O-methyl modified nucleotide
  modified_base 45: mod_base = OTHER; note = 2'-O-methyl modified nucleotide
  modified_base 47: mod_base = OTHER; note = 2'-O-methyl modified nucleotide
  modified_base 54: mod_base = OTHER; note = 2'-O-methyl modified nucleotide
  modified_base 55: mod_base = OTHER; note = 2'-O-methyl modified nucleotide
  modified_base 56: mod_base = OTHER; note = 2'-O-methyl modified nucleotide
  modified_base 57: mod_base = OTHER; note = 2'-O-methyl modified nucleotide
  modified_base 59: mod_base = OTHER; note = 2'-O-methyl modified nucleotide
  modified_base 65: mod_base = OTHER; note = 2'-O-methyl modified nucleotide
  modified_base 66: mod_base = OTHER; note = 2'-O-methyl modified nucleotide
  modified_base 67: mod_base = OTHER; note = 2'-O-methyl modified nucleotide
gggagggagggctagggtttttttttgaatttctactgttgtagattcacaggctccaggaagggtt

SEQ ID NO: 407 - RNA, 67 nt, synthetic construct
  source 1..67: mol_type = other RNA
  modified_base 26: mod_base = OTHER; note = 2'-O-methyl modified nucleotide
  modified_base 27: mod_base = OTHER; note = 2'-O-methyl modified nucleotide
  modified_base 31: mod_base = OTHER; note = 2'-O-methyl modified nucleotide
  modified_base 32: mod_base = OTHER; note = 2'-O-methyl modified nucleotide
  modified_base 34: mod_base = OTHER; note = 2'-O-methyl modified nucleotide
  modified_base 35: mod_base = OTHER; note = 2'-O-methyl modified nucleotide
  modified_base 36: mod_base = OTHER; note = 2'-O-methyl modified nucleotide
  modified_base 38: mod_base = OTHER; note = 2'-O-methyl modified nucleotide
  modified_base 39: mod_base = OTHER; note = 2'-O-methyl modified nucleotide
  modified_base 40: mod_base = OTHER; note = 2'-O-methyl modified nucleotide
  modified_base 42: mod_base = OTHER; note = 2'-O-methyl modified nucleotide
  modified_base 43: mod_base = OTHER; note = 2'-O-methyl modified nucleotide
  modified_base 44: mod_base = OTHER; note = 2'-O-methyl modified nucleotide
  modified_base 45: mod_base = OTHER; note = 2'-O-methyl modified nucleotide
  modified_base 47: mod_base = OTHER; note = 2'-O-methyl modified nucleotide
  modified_base 54: mod_base = OTHER; note = 2'-O-methyl modified nucleotide
  modified_base 55: mod_base = OTHER; note = 2'-O-methyl modified nucleotide
  modified_base 56: mod_base = OTHER; note = 2'-O-methyl modified nucleotide
  modified_base 57: mod_base = OTHER; note = 2'-O-methyl modified nucleotide
  modified_base 59: mod_base = OTHER; note = 2'-O-methyl modified nucleotide
  modified_base 65: mod_base = OTHER; note = 2'-O-methyl modified nucleotide
  modified_base 66: mod_base = OTHER; note = 2'-O-methyl modified nucleotide
  modified_base 67: mod_base = OTHER; note = 2'-O-methyl modified nucleotide
gggcagggctgggagggtttttttttgaatttctactgttgtagattcacaggctccaggaagggtt

SEQ ID NO: 408 - RNA, 68 nt, synthetic construct
  source 1..68: mol_type = other RNA
  modified_base 27: mod_base = OTHER; note = 2'-O-methyl modified nucleotide
  modified_base 28: mod_base = OTHER; note = 2'-O-methyl modified nucleotide
  modified_base 32: mod_base = OTHER; note = 2'-O-methyl modified nucleotide
  modified_base 33: mod_base = OTHER; note = 2'-O-methyl modified nucleotide
  modified_base 35: mod_base = OTHER; note = 2'-O-methyl modified nucleotide
  modified_base 36: mod_base = OTHER; note = 2'-O-methyl modified nucleotide
  modified_base 37: mod_base = OTHER; note = 2'-O-methyl modified nucleotide
  modified_base 39: mod_base = OTHER; note = 2'-O-methyl modified nucleotide
  modified_base 40: mod_base = OTHER; note = 2'-O-methyl modified nucleotide
  modified_base 41: mod_base = OTHER; note = 2'-O-methyl modified nucleotide
  modified_base 43: mod_base = OTHER; note = 2'-O-methyl modified nucleotide
  modified_base 44: mod_base = OTHER; note = 2'-O-methyl modified nucleotide
  modified_base 45: mod_base = OTHER; note = 2'-O-methyl modified nucleotide
  modified_base 46: mod_base = OTHER; note = 2'-O-methyl modified nucleotide
  modified_base 48: mod_base = OTHER; note = 2'-O-methyl modified nucleotide
  modified_base 55: mod_base = OTHER; note = 2'-O-methyl modified nucleotide
  modified_base 56: mod_base = OTHER; note = 2'-O-methyl modified nucleotide
  modified_base 57: mod_base = OTHER; note = 2'-O-methyl modified nucleotide
  modified_base 58: mod_base = OTHER; note = 2'-O-methyl modified nucleotide
  modified_base 60: mod_base = OTHER; note = 2'-O-methyl modified nucleotide
  modified_base 66: mod_base = OTHER; note = 2'-O-methyl modified nucleotide
  modified_base 67: mod_base = OTHER; note = 2'-O-methyl modified nucleotide
  modified_base 68: mod_base = OTHER; note = 2'-O-methyl modified nucleotide
gggctgggctgggcagggtttttttttgaatttctactgttgtagattcacaggctccaggaagggtt

SEQ ID NO: 409 - RNA, 92 nt, synthetic construct
  source 1..92: mol_type = other RNA
  modified_base 51: mod_base = OTHER; note = 2'-O-methyl modified nucleotide
  modified_base 52: mod_base = OTHER; note = 2'-O-methyl modified nucleotide
  modified_base 56: mod_base = OTHER; note = 2'-O-methyl modified nucleotide
  modified_base 57: mod_base = OTHER; note = 2'-O-methyl modified nucleotide
  modified_base 59: mod_base = OTHER; note = 2'-O-methyl modified nucleotide
  modified_base 60: mod_base = OTHER; note = 2'-O-methyl modified nucleotide
  modified_base 61: mod_base = OTHER; note = 2'-O-methyl modified nucleotide
  modified_base 63: mod_base = OTHER; note = 2'-O-methyl modified nucleotide
  modified_base 64: mod_base = OTHER; note = 2'-O-methyl modified nucleotide
  modified_base 65: mod_base = OTHER; note = 2'-O-methyl modified nucleotide
  modified_base 67: mod_base = OTHER; note = 2'-O-methyl modified nucleotide
  modified_base 68: mod_base = OTHER; note = 2'-O-methyl modified nucleotide
  modified_base 69: mod_base = OTHER; note = 2'-O-methyl modified nucleotide
  modified_base 70: mod_base = OTHER; note = 2'-O-methyl modified nucleotide
  modified_base 72: mod_base = OTHER; note = 2'-O-methyl modified nucleotide
  modified_base 79: mod_base = OTHER; note = 2'-O-methyl modified nucleotide
  modified_base 80: mod_base = OTHER; note = 2'-O-methyl modified nucleotide
  modified_base 81: mod_base = OTHER; note = 2'-O-methyl modified nucleotide
  modified_base 82: mod_base = OTHER; note = 2'-O-methyl modified nucleotide
  modified_base 84: mod_base = OTHER; note = 2'-O-methyl modified nucleotide
  modified_base 90: mod_base = OTHER; note = 2'-O-methyl modified nucleotide
  modified_base 91: mod_base = OTHER; note = 2'-O-methyl modified nucleotide
  modified_base 92: mod_base = OTHER; note = 2'-O-methyl modified nucleotide
ttgacgcggttctatctagttacgcgttaaaccaactagaaatttttttttgaatttctactgttgtagattcacaggctccaggaagggtt

SEQ ID NO: 410 - RNA, 75 nt, synthetic construct
  source 1..75: mol_type = other RNA
  modified_base 34: mod_base = OTHER; note = 2'-O-methyl modified nucleotide
  modified_base 35: mod_base = OTHER; note = 2'-O-methyl modified nucleotide
  modified_base 39: mod_base = OTHER; note = 2'-O-methyl modified nucleotide
  modified_base 40: mod_base = OTHER; note = 2'-O-methyl modified nucleotide
  modified_base 42: mod_base = OTHER; note = 2'-O-methyl modified nucleotide
  modified_base 43: mod_base = OTHER; note = 2'-O-methyl modified nucleotide
  modified_base 44: mod_base = OTHER; note = 2'-O-methyl modified nucleotide
  modified_base 46: mod_base = OTHER; note = 2'-O-methyl modified nucleotide
  modified_base 47: mod_base = OTHER; note = 2'-O-methyl modified nucleotide
  modified_base 48: mod_base = OTHER; note = 2'-O-methyl modified nucleotide
  modified_base 50: mod_base = OTHER; note = 2'-O-methyl modified nucleotide
  modified_base 51: mod_base = OTHER; note = 2'-O-methyl modified nucleotide
  modified_base 52: mod_base = OTHER; note = 2'-O-methyl modified nucleotide
  modified_base 53: mod_base = OTHER; note = 2'-O-methyl modified nucleotide
  modified_base 55: mod_base = OTHER; note = 2'-O-methyl modified nucleotide
  modified_base 62: mod_base = OTHER; note = 2'-O-methyl modified nucleotide
  modified_base 63: mod_base = OTHER; note = 2'-O-methyl modified nucleotide
  modified_base 64: mod_base = OTHER; note = 2'-O-methyl modified nucleotide
  modified_base 65: mod_base = OTHER; note = 2'-O-methyl modified nucleotide
  modified_base 67: mod_base = OTHER; note = 2'-O-methyl modified nucleotide
  modified_base 73: mod_base = OTHER; note = 2'-O-methyl modified nucleotide
  modified_base 74: mod_base = OTHER; note = 2'-O-methyl modified nucleotide
  modified_base 75: mod_base = OTHER; note = 2'-O-methyl modified nucleotide
ggagcagacgatatggcgtcgctcctttttttttgaatttctactgttgtagattcacaggctccaggaagggtt

SEQ ID NO: 411 - RNA, 50 nt, synthetic construct
  source 1..50: mol_type = other RNA
  modified_base 1: mod_base = OTHER; note = 2'-O-methyl modified nucleotide
  modified_base 2: mod_base = OTHER; note = 2'-O-methyl modified nucleotide
  modified_base 6: mod_base = OTHER; note = 2'-O-methyl modified nucleotide
  modified_base 7: mod_base = OTHER; note = 2'-O-methyl modified nucleotide
  modified_base 9: mod_base = OTHER; note = 2'-O-methyl modified nucleotide
  modified_base 10: mod_base = OTHER; note = 2'-O-methyl modified nucleotide
  modified_base 11: mod_base = OTHER; note = 2'-O-methyl modified nucleotide
  modified_base 13: mod_base = OTHER; note = 2'-O-methyl modified nucleotide
  modified_base 14: mod_base = OTHER; note = 2'-O-methyl modified nucleotide
  modified_base 15: mod_base = OTHER; note = 2'-O-methyl modified nucleotide
  modified_base 17: mod_base = OTHER; note = 2'-O-methyl modified nucleotide
  modified_base 18: mod_base = OTHER; note = 2'-O-methyl modified nucleotide
  modified_base 19: mod_base = OTHER; note = 2'-O-methyl modified nucleotide
  modified_base 20: mod_base = OTHER; note = 2'-O-methyl modified nucleotide
  modified_base 22: mod_base = OTHER; note = 2'-O-methyl modified nucleotide
  modified_base 29: mod_base = OTHER; note = 2'-O-methyl modified nucleotide
  modified_base 30: mod_base = OTHER; note = 2'-O-methyl modified nucleotide
  modified_base 31: mod_base = OTHER; note = 2'-O-methyl modified nucleotide
  modified_base 32: mod_base = OTHER; note = 2'-O-methyl modified nucleotide
  modified_base 34: mod_base = OTHER; note = 2'-O-methyl modified nucleotide
  modified_base 40: mod_base = OTHER; note = 2'-O-methyl modified nucleotide
  modified_base 41: mod_base = OTHER; note = 2'-O-methyl modified nucleotide
  modified_base 42: mod_base = OTHER; note = 2'-O-methyl modified nucleotide
tgaatttctactgttgtagattcacaggctccaggaagggtttttttttt

SEQ ID NO: 412 - RNA, 63 nt, synthetic construct
  source 1..63: mol_type = other RNA
  modified_base 1: mod_base = OTHER; note = 2'-O-methyl modified nucleotide
  modified_base 2: mod_base = OTHER; note = 2'-O-methyl modified nucleotide
  modified_base 6: mod_base = OTHER; note = 2'-O-methyl modified nucleotide
  modified_base 7: mod_base = OTHER; note = 2'-O-methyl modified nucleotide
  modified_base 9: mod_base = OTHER; note = 2'-O-methyl modified nucleotide
  modified_base 10: mod_base = OTHER; note = 2'-O-methyl modified nucleotide
  modified_base 11: mod_base = OTHER; note = 2'-O-methyl modified nucleotide
  modified_base 13: mod_base = OTHER; note = 2'-O-methyl modified nucleotide
  modified_base 14: mod_base = OTHER; note = 2'-O-methyl modified nucleotide
  modified_base 15: mod_base = OTHER; note = 2'-O-methyl modified nucleotide
  modified_base 17: mod_base = OTHER; note = 2'-O-methyl modified nucleotide
  modified_base 18: mod_base = OTHER; note = 2'-O-methyl modified nucleotide
  modified_base 19: mod_base = OTHER; note = 2'-O-methyl modified nucleotide
  modified_base 20: mod_base = OTHER; note = 2'-O-methyl modified nucleotide
  modified_base 22: mod_base = OTHER; note = 2'-O-methyl modified nucleotide
  modified_base 29: mod_base = OTHER; note = 2'-O-methyl modified nucleotide
  modified_base 30: mod_base = OTHER; note = 2'-O-methyl modified nucleotide
  modified_base 31: mod_base = OTHER; note = 2'-O-methyl modified nucleotide
  modified_base 32: mod_base = OTHER; note = 2'-O-methyl modified nucleotide
  modified_base 34: mod_base = OTHER; note = 2'-O-methyl modified nucleotide
  modified_base 40: mod_base = OTHER; note = 2'-O-methyl modified nucleotide
  modified_base 41: mod_base = OTHER; note = 2'-O-methyl modified nucleotide
  modified_base 42: mod_base = OTHER; note = 2'-O-methyl modified nucleotide
tgaatttctactgttgtagattcacaggctccaggaagggtttttttttttggtggtggtggt

SEQ ID NO: 413 - RNA, 66 nt, synthetic construct
  source 1..66: mol_type = other RNA
  modified_base 1: mod_base = OTHER; note = 2'-O-methyl modified nucleotide
  modified_base 2: mod_base = OTHER; note = 2'-O-methyl modified nucleotide
  modified_base 6: mod_base = OTHER; note = 2'-O-methyl modified nucleotide
  modified_base 7: mod_base = OTHER; note = 2'-O-methyl modified nucleotide
  modified_base 9: mod_base = OTHER; note = 2'-O-methyl modified nucleotide
  modified_base 10: mod_base = OTHER; note = 2'-O-methyl modified nucleotide
  modified_base 11: mod_base = OTHER; note = 2'-O-methyl modified nucleotide
  modified_base 13: mod_base = OTHER; note = 2'-O-methyl modified nucleotide
  modified_base 14: mod_base = OTHER; note = 2'-O-methyl modified nucleotide
  modified_base 15: mod_base = OTHER; note = 2'-O-methyl modified nucleotide
  modified_base 17: mod_base = OTHER; note = 2'-O-methyl modified nucleotide
  modified_base 18: mod_base = OTHER; note = 2'-O-methyl modified nucleotide
  modified_base 19: mod_base = OTHER; note = 2'-O-methyl modified nucleotide
  modified_base 20: mod_base = OTHER; note = 2'-O-methyl modified nucleotide
  modified_base 22: mod_base = OTHER; note = 2'-O-methyl modified nucleotide
  modified_base 29: mod_base = OTHER; note = 2'-O-methyl modified nucleotide
  modified_base 30: mod_base = OTHER; note = 2'-O-methyl modified nucleotide
  modified_base 31: mod_base = OTHER; note = 2'-O-methyl modified nucleotide
  modified_base 32: mod_base = OTHER; note = 2'-O-methyl modified nucleotide
  modified_base 34: mod_base = OTHER; note = 2'-O-methyl modified nucleotide
  modified_base 40: mod_base = OTHER; note = 2'-O-methyl modified nucleotide
  modified_base 41: mod_base = OTHER; note = 2'-O-methyl modified nucleotide
  modified_base 42: mod_base = OTHER; note = 2'-O-methyl modified nucleotide
tgaatttctactgttgtagattcacaggctccaggaagggttttttttttgggtgggagggctggg

SEQ ID NO: 414 - RNA, 67 nt, synthetic construct
  source 1..67: mol_type = other RNA
  modified_base 1: mod_base = OTHER; note = 2'-O-methyl modified nucleotide
  modified_base 2: mod_base = OTHER; note = 2'-O-methyl modified nucleotide
  modified_base 6: mod_base = OTHER; note = 2'-O-methyl modified nucleotide
  modified_base 7: mod_base = OTHER; note = 2'-O-methyl modified nucleotide
  modified_base 9: mod_base = OTHER; note = 2'-O-methyl modified nucleotide
  modified_base 10: mod_base = OTHER; note = 2'-O-methyl modified nucleotide
  modified_base 11: mod_base = OTHER; note = 2'-O-methyl modified nucleotide
  modified_base 13: mod_base = OTHER; note = 2'-O-methyl modified nucleotide
  modified_base 14: mod_base = OTHER; note = 2'-O-methyl modified nucleotide
  modified_base 15: mod_base = OTHER; note = 2'-O-methyl modified nucleotide
  modified_base 17: mod_base = OTHER; note = 2'-O-methyl modified nucleotide
  modified_base 18: mod_base = OTHER; note = 2'-O-methyl modified nucleotide
  modified_base 19: mod_base = OTHER; note = 2'-O-methyl modified nucleotide
  modified_base 20: mod_base = OTHER; note = 2'-O-methyl modified nucleotide
  modified_base 22: mod_base = OTHER; note = 2'-O-methyl modified nucleotide
  modified_base 29: mod_base = OTHER; note = 2'-O-methyl modified nucleotide
  modified_base 30: mod_base = OTHER; note = 2'-O-methyl modified nucleotide
  modified_base 31: mod_base = OTHER; note = 2'-O-methyl modified nucleotide
  modified_base 32: mod_base = OTHER; note = 2'-O-methyl modified nucleotide
  modified_base 34: mod_base = OTHER; note = 2'-O-methyl modified nucleotide
  modified_base 40: mod_base = OTHER; note = 2'-O-methyl modified nucleotide
  modified_base 41: mod_base = OTHER; note = 2'-O-methyl modified nucleotide
  modified_base 42: mod_base = OTHER; note = 2'-O-methyl modified nucleotide
tgaatttctactgttgtagattcacaggctccaggaagggttttttttttgggtgggctgggaaggg

SEQ ID NO: 415 - RNA, 67 nt, synthetic construct
  source 1..67: mol_type = other RNA
  modified_base 1: mod_base = OTHER; note = 2'-O-methyl modified nucleotide
  modified_base 2: mod_base = OTHER; note = 2'-O-methyl modified nucleotide
  modified_base 6: mod_base = OTHER; note = 2'-O-methyl modified nucleotide
  modified_base 7: mod_base = OTHER; note = 2'-O-methyl modified nucleotide
  modified_base 9: mod_base = OTHER; note = 2'-O-methyl modified nucleotide
  modified_base 10: mod_base = OTHER; note = 2'-O-methyl modified nucleotide
  modified_base 11: mod_base = OTHER; note = 2'-O-methyl modified nucleotide
  modified_base 13: mod_base = OTHER; note = 2'-O-methyl modified nucleotide
  modified_base 14: mod_base = OTHER; note = 2'-O-methyl modified nucleotide
  modified_base 15: mod_base = OTHER; note = 2'-O-methyl modified nucleotide
  modified_base 17: mod_base = OTHER; note = 2'-O-methyl modified nucleotide
  modified_base 18: mod_base = OTHER; note = 2'-O-methyl modified nucleotide
  modified_base 19: mod_base = OTHER; note = 2'-O-methyl modified nucleotide
  modified_base 20: mod_base = OTHER; note = 2'-O-methyl modified nucleotide
  modified_base 22: mod_base = OTHER; note = 2'-O-methyl modified nucleotide
  modified_base 29: mod_base = OTHER; note = 2'-O-methyl modified nucleotide
  modified_base 30: mod_base = OTHER; note = 2'-O-methyl modified nucleotide
  modified_base 31: mod_base = OTHER; note = 2'-O-methyl modified nucleotide
  modified_base 32: mod_base = OTHER; note = 2'-O-methyl modified nucleotide
  modified_base 34: mod_base = OTHER; note = 2'-O-methyl modified nucleotide
  modified_base 40: mod_base = OTHER; note = 2'-O-methyl modified nucleotide
  modified_base 41: mod_base = OTHER; note = 2'-O-methyl modified nucleotide
  modified_base 42: mod_base = OTHER; note = 2'-O-methyl modified nucleotide
tgaatttctactgttgtagattcacaggctccaggaagggttttttttttgggagggagggctaggg

SEQ ID NO: 416 - RNA, 67 nt, synthetic construct
  source 1..67: mol_type = other RNA
  modified_base 1: mod_base = OTHER; note = 2'-O-methyl modified nucleotide
  modified_base 2: mod_base = OTHER; note = 2'-O-methyl modified nucleotide
  modified_base 6: mod_base = OTHER; note = 2'-O-methyl modified nucleotide
  modified_base 7: mod_base = OTHER; note = 2'-O-methyl modified nucleotide
  modified_base 9: mod_base = OTHER; note = 2'-O-methyl modified nucleotide
  modified_base 10: mod_base = OTHER; note = 2'-O-methyl modified nucleotide
  modified_base 11: mod_base = OTHER; note = 2'-O-methyl modified nucleotide
  modified_base 13: mod_base = OTHER; note = 2'-O-methyl modified nucleotide
  modified_base 14: mod_base = OTHER; note = 2'-O-methyl modified nucleotide
  modified_base 15: mod_base = OTHER; note = 2'-O-methyl modified nucleotide
  modified_base 17: mod_base = OTHER; note = 2'-O-methyl modified nucleotide
  modified_base 18: mod_base = OTHER; note = 2'-O-methyl modified nucleotide
  modified_base 19: mod_base = OTHER; note = 2'-O-methyl modified nucleotide
  modified_base 20: mod_base = OTHER; note = 2'-O-methyl modified nucleotide
  modified_base 22: mod_base = OTHER; note = 2'-O-methyl modified nucleotide
  modified_base 29: mod_base = OTHER; note = 2'-O-methyl modified nucleotide
  modified_base 30: mod_base = OTHER; note = 2'-O-methyl modified nucleotide
  modified_base 31: mod_base = OTHER; note = 2'-O-methyl modified nucleotide
  modified_base 32: mod_base = OTHER; note = 2'-O-methyl modified nucleotide
  modified_base 34: mod_base = OTHER; note = 2'-O-methyl modified nucleotide
  modified_base 40: mod_base = OTHER; note = 2'-O-methyl modified nucleotide
  modified_base 41: mod_base = OTHER; note = 2'-O-methyl modified nucleotide
  modified_base 42: mod_base = OTHER; note = 2'-O-methyl modified nucleotide
tgaatttctactgttgtagattcacaggctccaggaagggttttttttttgggcagggctgggaggg

SEQ ID NO: 417 - RNA, 68 nt, synthetic construct
  source 1..68: mol_type = other RNA
  modified_base 1: mod_base = OTHER; note = 2'-O-methyl modified nucleotide
  modified_base 2: mod_base = OTHER; note = 2'-O-methyl modified nucleotide
  modified_base 6: mod_base = OTHER; note = 2'-O-methyl modified nucleotide
  modified_base 7: mod_base = OTHER; note = 2'-O-methyl modified nucleotide
  modified_base 9: mod_base = OTHER; note = 2'-O-methyl modified nucleotide
  modified_base 10: mod_base = OTHER; note = 2'-O-methyl modified nucleotide
  modified_base 11: mod_base = OTHER; note = 2'-O-methyl modified nucleotide
  modified_base 13: mod_base = OTHER; note = 2'-O-methyl modified nucleotide
  modified_base 14: mod_base = OTHER; note = 2'-O-methyl modified nucleotide
  modified_base 15: mod_base = OTHER; note = 2'-O-methyl modified nucleotide
  modified_base 17: mod_base = OTHER; note = 2'-O-methyl modified nucleotide
  modified_base 18: mod_base = OTHER; note = 2'-O-methyl modified nucleotide
  modified_base 19: mod_base = OTHER; note = 2'-O-methyl modified nucleotide
  modified_base 20: mod_base = OTHER; note = 2'-O-methyl modified nucleotide
  modified_base 22: mod_base = OTHER; note = 2'-O-methyl modified nucleotide
  modified_base 29: mod_base = OTHER; note = 2'-O-methyl modified nucleotide
  modified_base 30: mod_base = OTHER; note = 2'-O-methyl modified nucleotide
  modified_base 31: mod_base = OTHER; note = 2'-O-methyl modified nucleotide
  modified_base 32: mod_base = OTHER; note = 2'-O-methyl modified nucleotide
  modified_base 34: mod_base = OTHER; note = 2'-O-methyl modified nucleotide
  modified_base 40: mod_base = OTHER; note = 2'-O-methyl modified nucleotide
  modified_base 41: mod_base = OTHER; note = 2'-O-methyl modified nucleotide
  modified_base 42: mod_base = OTHER; note = 2'-O-methyl modified nucleotide
tgaatttctactgttgtagattcacaggctccaggaagggttttttttttgggctgggctgggcaggg

SEQ ID NO: 418 - RNA, 92 nt, synthetic construct
  source 1..92: mol_type = other RNA
  modified_base 1: mod_base = OTHER; note = 2'-O-methyl modified nucleotide
  modified_base 2: mod_base = OTHER; note = 2'-O-methyl modified nucleotide
  modified_base 6: mod_base = OTHER; note = 2'-O-methyl modified nucleotide
  modified_base 7: mod_base = OTHER; note = 2'-O-methyl modified nucleotide
  modified_base 9: mod_base = OTHER; note = 2'-O-methyl modified nucleotide
  modified_base 10: mod_base = OTHER; note = 2'-O-methyl modified nucleotide
  modified_base 11: mod_base = OTHER; note = 2'-O-methyl modified nucleotide
  modified_base 13: mod_base = OTHER; note = 2'-O-methyl modified nucleotide
  modified_base 14: mod_base = OTHER; note = 2'-O-methyl modified nucleotide
  modified_base 15: mod_base = OTHER; note = 2'-O-methyl modified nucleotide
  modified_base 17: mod_base = OTHER; note = 2'-O-methyl modified nucleotide
  modified_base 18: mod_base = OTHER; note = 2'-O-methyl modified nucleotide
  modified_base 19: mod_base = OTHER; note = 2'-O-methyl modified nucleotide
  modified_base 20: mod_base = OTHER; note = 2'-O-methyl modified nucleotide
  modified_base 22: mod_base = OTHER; note = 2'-O-methyl modified nucleotide
  modified_base 29: mod_base = OTHER; note = 2'-O-methyl modified nucleotide
  modified_base 30: mod_base = OTHER; note = 2'-O-methyl modified nucleotide
  modified_base 31: mod_base = OTHER; note = 2'-O-methyl modified nucleotide
  modified_base 32: mod_base = OTHER; note = 2'-O-methyl modified nucleotide
  modified_base 34: mod_base = OTHER; note = 2'-O-methyl modified nucleotide
  modified_base 40: mod_base = OTHER; note = 2'-O-methyl modified nucleotide
  modified_base 41: mod_base = OTHER; note = 2'-O-methyl modified nucleotide
  modified_base 42: mod_base = OTHER; note = 2'-O-methyl modified nucleotide
tgaatttctactgttgtagattcacaggctccaggaagggttttttttttttgacgcggttctatctagttacgcgttaaaccaactagaaa

SEQ ID NO: 419 - RNA, 75 nt, synthetic construct
  source 1..75: mol_type = other RNA
  modified_base 1: mod_base = OTHER; note = 2'-O-methyl modified nucleotide
  modified_base 2: mod_base = OTHER; note = 2'-O-methyl modified nucleotide
  modified_base 6: mod_base = OTHER; note = 2'-O-methyl modified nucleotide
  modified_base 7: mod_base = OTHER; note = 2'-O-methyl modified nucleotide
  modified_base 9: mod_base = OTHER; note = 2'-O-methyl modified nucleotide
  modified_base 10: mod_base = OTHER; note = 2'-O-methyl modified nucleotide
  modified_base 11: mod_base = OTHER; note = 2'-O-methyl modified nucleotide
  modified_base 13: mod_base = OTHER; note = 2'-O-methyl modified nucleotide
  modified_base 14: mod_base = OTHER; note = 2'-O-methyl modified nucleotide
  modified_base 15: mod_base = OTHER; note = 2'-O-methyl modified nucleotide
  modified_base 17: mod_base = OTHER; note = 2'-O-methyl modified nucleotide
  modified_base 18: mod_base = OTHER; note = 2'-O-methyl modified nucleotide
  modified_base 19: mod_base = OTHER; note = 2'-O-methyl modified nucleotide
  modified_base 20: mod_base = OTHER; note = 2'-O-methyl modified nucleotide
  modified_base 22: mod_base = OTHER; note = 2'-O-methyl modified nucleotide
  modified_base 29: mod_base = OTHER; note = 2'-O-methyl modified nucleotide
  modified_base 30: mod_base = OTHER; note = 2'-O-methyl modified nucleotide
  modified_base 31: mod_base = OTHER; note = 2'-O-methyl modified nucleotide
  modified_base 32: mod_base = OTHER; note = 2'-O-methyl modified nucleotide
  modified_base 34: mod_base = OTHER; note = 2'-O-methyl modified nucleotide
  modified_base 40: mod_base = OTHER; note = 2'-O-methyl modified nucleotide
  modified_base 41: mod_base = OTHER; note = 2'-O-methyl modified nucleotide
  modified_base 42: mod_base = OTHER; note = 2'-O-methyl modified nucleotide
tgaatttctactgttgtagattcacaggctccaggaagggttttttttttggagcagacgatatggcgtcgctcc

SEQ ID NO: 420 - RNA, 54 nt, synthetic construct
  source 1..54: mol_type = other RNA
taatttctactcttgtagatccttgtcaaggctattggtcatgaccaatagcct

SEQ ID NO: 421 - RNA, 53 nt, synthetic construct
  source 1..53: mol_type = other RNA
taatttctactcttgtagatccttgtcaaggctattggtcatgaccaatagcc

SEQ ID NO: 422 - RNA, 56 nt, synthetic construct
  source 1..56: mol_type = other RNA
tgaatttctactgttgtagatccttgtcaaggctattggtcatgaccaatagcctt

SEQ ID NO: 423 - RNA, 52 nt, synthetic construct
  source 1..52: mol_type = other RNA
aatttctactgttgtagatccttgtcaaggctattggtcatgaccaatagcc

SEQ ID NO: 424 - RNA, 55 nt, synthetic construct
  source 1..55: mol_type = other RNA
  modified_base 55: mod_base = OTHER; note = 2'-O-methyl modified nucleotide
taatttctactcttgtagatccttgtcaaggctattggtcatgaccaatagccts

SEQ ID NO: 425 - RNA, 54 nt, synthetic construct
  source 1..54: mol_type = other RNA
  modified_base 54: mod_base = OTHER; note = 2'-O-methyl modified nucleotide
taatttctactcttgtagatccttgtcaaggctattggtcatgaccaatagccs

SEQ ID NO: 426 - RNA, 57 nt, synthetic construct
  source 1..57: mol_type = other RNA
  modified_base 57: mod_base = OTHER; note = 2'-O-methyl modified nucleotide
tgaatttctactgttgtagatccttgtcaaggctattggtcatgaccaatagcctts

SEQ ID NO: 427 - RNA, 53 nt, synthetic construct
  source 1..53: mol_type = other RNA
  modified_base 53: mod_base = OTHER; note = 2'-O-methyl modified nucleotide
aatttctactgttgtagatccttgtcaaggctattggtcatgaccaatagccs

SEQ ID NO: 428 - RNA, 69 nt, synthetic construct
  source 1..69: mol_type = other RNA
  modified_base 1: mod_base = OTHER; note = 2'-O-methyl modified nucleotide
  modified_base 2: mod_base = OTHER; note = 2'-O-methyl modified nucleotide
  modified_base 3: mod_base = OTHER; note = 2'-O-methyl modified nucleotide
  modified_base 5: mod_base = OTHER; note = 2'-O-methyl modified nucleotide
  modified_base 6: mod_base = OTHER; note = 2'-O-methyl modified nucleotide
  modified_base 7: mod_base = OTHER; note = 2'-O-methyl modified nucleotide
  modified_base 8: mod_base = OTHER; note = 2'-O-methyl modified nucleotide
  modified_base 9: mod_base = OTHER; note = 2'-O-methyl modified nucleotide
  modified_base 11: mod_base = OTHER; note = 2'-O-methyl modified nucleotide
  modified_base 12: mod_base = OTHER; note = 2'-O-methyl modified nucleotide
  modified_base 13: mod_base = OTHER; note = 2'-O-methyl modified nucleotide
  modified_base 14: mod_base = OTHER; note = 2'-O-methyl modified nucleotide
  modified_base 15: mod_base = OTHER; note = 2'-O-methyl modified nucleotide
  modified_base 16: mod_base = OTHER; note = 2'-O-methyl modified nucleotide
  modified_base 18: mod_base = OTHER; note = 2'-O-methyl modified nucleotide
  modified_base 49: mod_base = OTHER; note = 2'-O-methyl modified nucleotide
  modified_base 57: mod_base = OTHER; note = 2'-O-methyl modified nucleotide
  modified_base 58: mod_base = OTHER; note = 2'-O-methyl modified nucleotide
  modified_base 59: mod_base = OTHER; note = 2'-O-methyl modified nucleotide
  modified_base 61: mod_base = OTHER; note = 2'-O-methyl modified nucleotide
  modified_base 67: mod_base = OTHER; note = 2'-O-methyl modified nucleotide
  modified_base 68: mod_base = OTHER; note = 2'-O-methyl modified nucleotide
  modified_base 69: mod_base = OTHER; note = 2'-O-methyl modified nucleotide
acatgaggatcacccatgttttttttttgaatttctactgttgtagatcattgagatagtgtggggaag

SEQ ID NO: 429 - RNA, 69 nt, synthetic construct
  source 1..69: mol_type = other RNA
  modified_base 22: mod_base = OTHER; note = 2'-O-methyl modified nucleotide
  modified_base 30: mod_base = OTHER; note = 2'-O-methyl modified nucleotide
  modified_base 31: mod_base = OTHER; note = 2'-O-methyl modified nucleotide
  modified_base 32: mod_base = OTHER; note = 2'-O-methyl modified nucleotide
  modified_base 34: mod_base = OTHER; note = 2'-O-methyl modified nucleotide
  modified_base 40: mod_base = OTHER; note = 2'-O-methyl modified nucleotide
  modified_base 41: mod_base = OTHER; note = 2'-O-methyl modified nucleotide
  modified_base 42: mod_base = OTHER; note = 2'-O-methyl modified nucleotide
  modified_base 51: mod_base = OTHER; note = 2'-O-methyl modified nucleotide
  modified_base 52: mod_base = OTHER; note = 2'-O-methyl modified nucleotide
  modified_base 53: mod_base = OTHER; note = 2'-O-methyl modified nucleotide
  modified_base 55: mod_base = OTHER; note = 2'-O-methyl modified nucleotide
  modified_base 56: mod_base = OTHER; note = 2'-O-methyl modified nucleotide
  modified_base 57: mod_base = OTHER; note = 2'-O-methyl modified nucleotide
  modified_base 58: mod_base = OTHER; note = 2'-O-methyl modified nucleotide
  modified_base 59: mod_base = OTHER; note = 2'-O-methyl modified nucleotide
  modified_base 61: mod_base = OTHER; note = 2'-O-methyl modified nucleotide
  modified_base 62: mod_base = OTHER; note = 2'-O-methyl modified nucleotide
  modified_base 63: mod_base = OTHER; note = 2'-O-methyl modified nucleotide
  modified_base 64: mod_base = OTHER; note = 2'-O-methyl modified nucleotide
  modified_base 65: mod_base = OTHER; note = 2'-O-methyl modified nucleotide
  modified_base 66: mod_base = OTHER; note = 2'-O-methyl modified nucleotide
  modified_base 68: mod_base = OTHER; note = 2'-O-methyl modified nucleotide
tgaatttctactgttgtagatcattgagatagtgtggggaagttttttttacatgaggatcacccatgt

SEQ ID NO: 430 - RNA, 69 nt, synthetic construct
  source 1..69: mol_type = other RNA
  modified_base 1: mod_base = OTHER; note = 2'-O-methyl modified nucleotide
  modified_base 2: mod_base = OTHER; note = 2'-O-methyl modified nucleotide
  modified_base 3: mod_base = OTHER; note = 2'-O-methyl modified nucleotide
  modified_base 5: mod_base = OTHER; note = 2'-O-methyl modified nucleotide
  modified_base 6: mod_base = OTHER; note = 2'-O-methyl modified nucleotide
  modified_base 7: mod_base = OTHER; note = 2'-O-methyl modified nucleotide
  modified_base 8: mod_base = OTHER; note = 2'-O-methyl modified nucleotide
  modified_base 9: mod_base = OTHER; note = 2'-O-methyl modified nucleotide
  modified_base 11: mod_base = OTHER; note = 2'-O-methyl modified nucleotide
  modified_base 12: mod_base = OTHER; note = 2'-O-methyl modified nucleotide
  modified_base 13: mod_base = OTHER; note = 2'-O-methyl modified nucleotide
  modified_base 14: mod_base = OTHER; note = 2'-O-methyl modified nucleotide
  modified_base 15: mod_base = OTHER; note = 2'-O-methyl modified nucleotide
  modified_base 16: mod_base = OTHER; note = 2'-O-methyl modified nucleotide
  modified_base 18: mod_base = OTHER; note = 2'-O-methyl modified nucleotide
  modified_base 49: mod_base = OTHER; note = 2'-O-methyl modified nucleotide
  modified_base 56: mod_base = OTHER; note = 2'-O-methyl modified nucleotide
  modified_base 57: mod_base = OTHER; note = 2'-O-methyl modified nucleotide
  modified_base 58: mod_base = OTHER; note = 2'-O-methyl modified nucleotide
  modified_base 59: mod_base = OTHER; note = 2'-O-methyl modified nucleotide
  modified_base 61: mod_base = OTHER; note = 2'-O-methyl modified nucleotide
  modified_base 67: mod_base = OTHER; note = 2'-O-methyl modified nucleotide
  modified_base 68: mod_base = OTHER; note = 2'-O-methyl modified nucleotide
  modified_base 69: mod_base = OTHER; note = 2'-O-methyl modified nucleotide
acatgaggatcacccatgttttttttttgaatttctactgttgtagattcacaggctccaggaagggtt

SEQ ID NO: 431 - RNA, 69 nt, synthetic construct
  source 1..69: mol_type = other RNA
  modified_base 22: mod_base = OTHER; note = 2'-O-methyl modified nucleotide
  modified_base 29: mod_base = OTHER; note = 2'-O-methyl modified nucleotide
  modified_base 30: mod_base = OTHER; note = 2'-O-methyl modified nucleotide
  modified_base 31: mod_base = OTHER; note = 2'-O-methyl modified nucleotide
  modified_base 32: mod_base = OTHER; note = 2'-O-methyl modified nucleotide
  modified_base 34: mod_base = OTHER; note = 2'-O-methyl modified nucleotide
  modified_base 40: mod_base = OTHER; note = 2'-O-methyl modified nucleotide
  modified_base 41: mod_base = OTHER; note = 2'-O-methyl modified nucleotide
  modified_base 42: mod_base = OTHER; note = 2'-O-methyl modified nucleotide
  modified_base 51: mod_base = OTHER; note = 2'-O-methyl modified nucleotide
  modified_base 52: mod_base = OTHER; note = 2'-O-methyl modified nucleotide
  modified_base 53: mod_base = OTHER; note = 2'-O-methyl modified nucleotide
  modified_base 55: mod_base = OTHER; note = 2'-O-methyl modified nucleotide
  modified_base 56: mod_base = OTHER; note = 2'-O-methyl modified nucleotide
  modified_base 57: mod_base = OTHER; note = 2'-O-methyl modified nucleotide
  modified_base 58: mod_base = OTHER; note = 2'-O-methyl modified nucleotide
  modified_base 59: mod_base = OTHER; note = 2'-O-methyl modified nucleotide
  modified_base 61: mod_base = OTHER; note = 2'-O-methyl modified nucleotide
  modified_base 62: mod_base = OTHER; note = 2'-O-methyl modified nucleotide
  modified_base 63: mod_base = OTHER; note = 2'-O-methyl modified nucleotide
  modified_base 64: mod_base = OTHER; note = 2'-O-methyl modified nucleotide
  modified_base 65: mod_base = OTHER; note = 2'-O-methyl modified nucleotide
  modified_base 66: mod_base = OTHER; note = 2'-O-methyl modified nucleotide
  modified_base 68: mod_base = OTHER; note = 2'-O-methyl modified nucleotide
tgaatttctactgttgtagattcacaggctccaggaagggttttttttttacatgaggatcacccatgt

SEQ ID NO: 432 - RNA, 42 nt, synthetic construct
  source 1..42: mol_type = other RNA
  modified_base 1: mod_base = OTHER; note = 2'-O-methyl modified nucleotide with phosphorothioate linkage
  modified_base 2: mod_base = OTHER; note = 2'-O-methyl modified nucleotide with phosphorothioate linkage
  modified_base 3: mod_base = OTHER; note = 2'-O-methyl modified nucleotide
  modified_base 40: mod_base = OTHER; note = 2'-O-methyl modified nucleotide
  modified_base 41: mod_base = OTHER; note = 2'-O-methyl modified nucleotide with phosphorothioate linkage
  modified_base 42: mod_base = OTHER; note = 2'-O-methyl modified nucleotide
tgaatttctactgttgtagatttccgattcagtcattccagt

SEQ ID NO: 433 - RNA, 42 nt, synthetic construct
  source 1..42: mol_type = other RNA
  modified_base 1: mod_base = OTHER; note = 2'-O-methyl modified nucleotide with phosphorothioate linkage
  modified_base 2: mod_base = OTHER; note = 2'-O-methyl modified nucleotide with phosphorothioate linkage
  modified_base 3: mod_base = OTHER; note = 2'-O-methyl modified nucleotide
  modified_base 40: mod_base = OTHER; note = 2'-O-methyl modified nucleotide
  modified_base 41: mod_base = OTHER; note = 2'-O-methyl modified nucleotide with phosphorothioate linkage
  modified_base 42: mod_base = OTHER; note = 2'-O-methyl modified nucleotide
tgaatttctactgttgtagatccttgttccgattcagtcatt

SEQ ID NO: 434 - RNA, 42 nt, synthetic construct
  source 1..42: mol_type = other RNA
  modified_base 1: mod_base = OTHER; note = 2'-O-methyl modified nucleotide with phosphorothioate linkage
  modified_base 2: mod_base = OTHER; note = 2'-O-methyl modified nucleotide with phosphorothioate linkage
  modified_base 3: mod_base = OTHER; note = 2'-O-methyl modified nucleotide
  modified_base 40: mod_base = OTHER; note = 2'-O-methyl modified nucleotide
  modified_base 41: mod_base = OTHER; note = 2'-O-methyl modified nucleotide with phosphorothioate linkage
  modified_base 42: mod_base = OTHER; note = 2'-O-methyl modified nucleotide
tgaatttctactgttgtagatgccttgttccgattcagtcat

SEQ ID NO: 435 - RNA, 42 nt, synthetic construct
  source 1..42: mol_type = other RNA
  modified_base 1: mod_base = OTHER; note = 2'-O-methyl modified nucleotide with phosphorothioate linkage
  modified_base 2: mod_base = OTHER; note = 2'-O-methyl modified nucleotide with phosphorothioate linkage
  modified_base 3: mod_base = OTHER; note = 2'-O-methyl modified nucleotide
  modified_base 40: mod_base = OTHER; note = 2'-O-methyl modified nucleotide
  modified_base 41: mod_base = OTHER; note = 2'-O-methyl modified nucleotide with phosphorothioate linkage
  modified_base 42: mod_base = OTHER; note = 2'-O-methyl modified nucleotide
tgaatttctactgttgtagattagcctttgccttgttccgat

SEQ ID NO: 436 - RNA, 42 nt, synthetic construct
  source 1..42: mol_type = other RNA
  modified_base 1: mod_base = OTHER; note = 2'-O-methyl modified nucleotide with phosphorothioate linkage
  modified_base 2: mod_base = OTHER; note = 2'-O-methyl modified nucleotide with phosphorothioate linkage
  modified_base 3: mod_base = OTHER; note = 2'-O-methyl modified nucleotide
  modified_base 40: mod_base = OTHER; note = 2'-O-methyl modified nucleotide
  modified_base 41: mod_base = OTHER; note = 2'-O-methyl modified nucleotide with phosphorothioate linkage
  modified_base 42: mod_base = OTHER; note = 2'-O-methyl modified nucleotide
tgaatttctactgttgtagatatagcctttgccttgttccga

SEQ ID NO: 437 - RNA, 42 nt, synthetic construct
  source 1..42: mol_type = other RNA
  modified_base 1: mod_base = OTHER; note = 2'-O-methyl modified nucleotide with phosphorothioate linkage
  modified_base 2: mod_base = OTHER; note = 2'-O-methyl modified nucleotide with phosphorothioate linkage
  modified_base 3: mod_base = OTHER; note = 2'-O-methyl modified nucleotide
  modified_base 40: mod_base = OTHER; note = 2'-O-methyl modified nucleotide
  modified_base 41: mod_base = OTHER; note = 2'-O-methyl modified nucleotide with phosphorothioate linkage
  modified_base 42: mod_base = OTHER; note = 2'-O-methyl modified nucleotide
tgaatttctactgttgtagattatagcctttgccttgttccg

SEQ ID NO: 438 - RNA, 42 nt, synthetic construct
  source 1..42: mol_type = other RNA
  modified_base 1: mod_base = OTHER; note = 2'-O-methyl modified nucleotide with phosphorothioate linkage
  modified_base 2: mod_base = OTHER; note = 2'-O-methyl modified nucleotide with phosphorothioate linkage
  modified_base 3: mod_base = OTHER; note = 2'-O-methyl modified nucleotide
  modified_base 40: mod_base = OTHER; note = 2'-O-methyl modified nucleotide
  modified_base 41: mod_base = OTHER; note = 2'-O-methyl modified nucleotide with phosphorothioate linkage
  modified_base 42: mod_base = OTHER; note = 2'-O-methyl modified nucleotide
tgaatttctactgttgtagatttatagcctttgccttgttcc

SEQ ID NO: 439 - RNA, 42 nt, synthetic construct
  source 1..42: mol_type = other RNA
  modified_base 1: mod_base = OTHER; note = 2'-O-methyl modified nucleotide with phosphorothioate linkage
  modified_base 2: mod_base = OTHER; note = 2'-O-methyl modified nucleotide with phosphorothioate linkage
  modified_base 3: mod_base = OTHER; note = 2'-O-methyl modified nucleotide
  modified_base 40: mod_base = OTHER; note = 2'-O-methyl modified nucleotide
  modified_base 41: mod_base = OTHER; note = 2'-O-methyl modified nucleotide with phosphorothioate linkage
  modified_base 42: mod_base = OTHER; note = 2'-O-methyl modified nucleotide
tgaatttctactgttgtagattttatagcctttgccttgttc

SEQ ID NO: 440 - RNA, 42 nt, synthetic construct
  source 1..42: mol_type = other RNA
  modified_base 1: mod_base = OTHER; note = 2'-O-methyl modified nucleotide with phosphorothioate linkage
  modified_base 2: mod_base = OTHER; note = 2'-O-methyl modified nucleotide with phosphorothioate linkage
  modified_base 3: mod_base = OTHER; note = 2'-O-methyl modified nucleotide
  modified_base 40: mod_base = OTHER; note = 2'-O-methyl modified nucleotide
  modified_base 41: mod_base = OTHER; note = 2'-O-methyl modified nucleotide with phosphorothioate linkage
  modified_base 42: mod_base = OTHER; note = 2'-O-methyl modified nucleotide
tgaatttctactgttgtagatttttatagcctttgccttgtt

SEQ ID NO: 441 - RNA, 42 nt, synthetic construct
  source 1..42: mol_type = other RNA
  modified_base 1: mod_base = OTHER; note = 2'-O-methyl modified nucleotide with phosphorothioate linkage
  modified_base 2: mod_base = OTHER; note = 2'-O-methyl modified nucleotide with phosphorothioate linkage
  modified_base 3: mod_base = OTHER; note = 2'-O-methyl modified nucleotide
  modified_base 40: mod_base = OTHER; note = 2'-O-methyl modified nucleotide
  modified_base 41: mod_base = OTHER; note = 2'-O-methyl modified nucleotide with phosphorothioate linkage
  modified_base 42: mod_base = OTHER; note = 2'-O-methyl modified nucleotide
tgaatttctactgttgtagattttttatagcctttgccttgt

SEQ ID NO: 442 - RNA, 42 nt, synthetic construct
  source 1..42: mol_type = other RNA
  modified_base 1: mod_base = OTHER; note = 2'-O-methyl modified nucleotide with phosphorothioate linkage
  modified_base 2: mod_base = OTHER; note = 2'-O-methyl modified nucleotide with phosphorothioate linkage
  modified_base 3: mod_base = OTHER; note = 2'-O-methyl modified nucleotide
  modified_base 40: mod_base = OTHER; note = 2'-O-methyl modified nucleotide
  modified_base 41: mod_base = OTHER; note = 2'-O-methyl modified nucleotide with phosphorothioate linkage
  modified_base 42: mod_base = OTHER; note = 2'-O-methyl modified nucleotide
tgaatttctactgttgtagatagatagtgtggggaaggggcc

SEQ ID NO: 443 - RNA, 42 nt, synthetic construct
  source 1..42: mol_type = other RNA
  modified_base 1: mod_base = OTHER; note = 2'-O-methyl modified nucleotide with phosphorothioate linkage
  modified_base 2: mod_base = OTHER; note = 2'-O-methyl modified nucleotide with phosphorothioate linkage
  modified_base 3: mod_base = OTHER; note = 2'-O-methyl modified nucleotide
  modified_base 40: mod_base = OTHER; note = 2'-O-methyl modified nucleotide
  modified_base 41: mod_base = OTHER; note = 2'-O-methyl modified nucleotide with phosphorothioate linkage
  modified_base 42: mod_base = OTHER; note = 2'-O-methyl modified nucleotide
tgaatttctactgttgtagatgcagtatcctcttgggggccc

SEQ ID NO: 444 - RNA, 42 nt, synthetic construct
  source 1..42: mol_type = other RNA
  modified_base 1: mod_base = OTHER; note = 2'-O-methyl modified nucleotide with phosphorothioate linkage
  modified_base 2: mod_base = OTHER; note = 2'-O-methyl modified nucleotide with phosphorothioate linkage
  modified_base 3: mod_base = OTHER; note = 2'-O-methyl modified nucleotide
  modified_base 40: mod_base = OTHER; note = 2'-O-methyl modified nucleotide
  modified_base 41: mod_base = OTHER; note = 2'-O-methyl modified nucleotide with phosphorothioate linkage
  modified_base 42: mod_base = OTHER; note = 2'-O-methyl modified nucleotide
tgaatttctactgttgtagatgcattgagatagtgtggggaa

SEQ ID NO: 445 - RNA, 42 nt, synthetic construct
  source 1..42: mol_type = other RNA
  modified_base 1: mod_base = OTHER; note = 2'-O-methyl modified nucleotide with phosphorothioate linkage
  modified_base 2: mod_base = OTHER; note = 2'-O-methyl modified nucleotide with phosphorothioate linkage
  modified_base 3: mod_base = OTHER; note = 2'-O-methyl modified nucleotide
  modified_base 40: mod_base = OTHER; note = 2'-O-methyl modified nucleotide
  modified_base 41: mod_base = OTHER; note = 2'-O-methyl modified nucleotide with phosphorothioate linkage
  modified_base 42: mod_base = OTHER; note = 2'-O-methyl modified nucleotide
tgaatttctactgttgtagatggggccccttccccacactat

SEQ ID NO: 446 - RNA, 42 nt, synthetic construct
  source 1..42: mol_type = other RNA
  modified_base 1: mod_base = OTHER; note = 2'-O-methyl modified nucleotide with phosphorothioate linkage
  modified_base 2: mod_base = OTHER; note = 2'-O-methyl modified nucleotide with phosphorothioate linkage
  modified_base 3: mod_base = OTHER; note = 2'-O-methyl modified nucleotide
  modified_base 40: mod_base = OTHER; note = 2'-O-methyl modified nucleotide
  modified_base 41: mod_base = OTHER; note = 2'-O-methyl modified nucleotide with phosphorothioate linkage
  modified_base 42: mod_base = OTHER; note = 2'-O-methyl modified nucleotide
tgaatttctactgttgtagatcagacagatatttgcattgag

SEQ ID NO: 447 - RNA, 42 nt, synthetic construct
  source 1..42: mol_type = other RNA
  modified_base 1: mod_base = OTHER; note = 2'-O-methyl modified nucleotide with phosphorothioate linkage
  modified_base 2: mod_base = OTHER; note = 2'-O-methyl modified nucleotide with phosphorothioate linkage
  modified_base 3: mod_base = OTHER; note = 2'-O-methyl modified nucleotide
  modified_base 40: mod_base = OTHER; note = 2'-O-methyl modified nucleotide
  modified_base 41: mod_base = OTHER; note = 2'-O-methyl modified nucleotide with phosphorothioate linkage
  modified_base 42: mod_base = OTHER; note = 2'-O-methyl modified nucleotide
tgaatttctactgttgtagatcccacactatctcaatgcaaa

SEQ ID NO: 448 - RNA, 42 nt, synthetic construct
  source 1..42: mol_type = other RNA
  modified_base 1: mod_base = OTHER; note = 2'-O-methyl modified nucleotide with phosphorothioate linkage
  modified_base 2: mod_base = OTHER; note = 2'-O-methyl modified nucleotide with phosphorothioate linkage
  modified_base 3: mod_base = OTHER; note = 2'-O-methyl modified nucleotide
  modified_base 40: mod_base = OTHER; note = 2'-O-methyl modified nucleotide
  modified_base 41: mod_base = OTHER; note = 2'-O-methyl modified nucleotide with phosphorothioate linkage
  modified_base 42: mod_base = OTHER; note = 2'-O-methyl modified nucleotide
tgaatttctactgttgtagatagccagggaccgtttcagaca

SEQ ID NO: 449 - RNA, 42 nt, synthetic construct
  source 1..42: mol_type = other RNA
  modified_base 1: mod_base = OTHER; note = 2'-O-methyl modified nucleotide with phosphorothioate linkage
  modified_base 2: mod_base = OTHER; note = 2'-O-methyl modified nucleotide with phosphorothioate linkage
  modified_base 3: mod_base = OTHER; note = 2'-O-methyl modified nucleotide
  modified_base 40: mod_base = OTHER; note = 2'-O-methyl modified nucleotide
  modified_base 41: mod_base = OTHER; note = 2'-O-methyl modified nucleotide with phosphorothioate linkage
  modified_base 42: mod_base = OTHER; note = 2'-O-methyl modified nucleotide
tgaatttctactgttgtagatgtcaaggcaaggctggccaac

SEQ ID NO: 450 - RNA, 42 nt, synthetic construct
  source 1..42: mol_type = other RNA
  modified_base 1: mod_base = OTHER; note = 2'-O-methyl modified nucleotide with phosphorothioate linkage
  modified_base 2: mod_base = OTHER; note = 2'-O-methyl modified nucleotide with phosphorothioate linkage
  modified_base 3: mod_base = OTHER; note = 2'-O-methyl modified nucleotide
  modified_base 40: mod_base = OTHER; note = 2'-O-methyl modified nucleotide
  modified_base 41: mod_base = OTHER; note = 2'-O-methyl modified nucleotide with phosphorothioate linkage
  modified_base 42: mod_base = OTHER; note = 2'-O-methyl modified nucleotide
tgaatttctactgttgtagattcaaggctattggtcaaggca

SEQ ID NO: 451 - RNA, 42 nt, synthetic construct
  source 1..42: mol_type = other RNA
  modified_base 1: mod_base = OTHER; note = 2'-O-methyl modified nucleotide with phosphorothioate linkage
  modified_base 2: mod_base = OTHER; note = 2'-O-methyl modified nucleotide with phosphorothioate linkage
  modified_base 3: mod_base = OTHER; note = 2'-O-methyl modified nucleotide
  modified_base 40: mod_base = OTHER; note = 2'-O-methyl modified nucleotide
  modified_base 41: mod_base = OTHER; note = 2'-O-methyl modified nucleotide with phosphorothioate linkage
  modified_base 42: mod_base = OTHER; note = 2'-O-methyl modified nucleotide
tgaatttctactgttgtagatgccttgtcaaggctattggtc

SEQ ID NO: 452 - RNA, 42 nt, synthetic construct
  source 1..42: mol_type = other RNA
  modified_base 1: mod_base = OTHER; note = 2'-O-methyl modified nucleotide with phosphorothioate linkage
  modified_base 2: mod_base = OTHER; note = 2'-O-methyl modified nucleotide with phosphorothioate linkage
  modified_base 3: mod_base = OTHER; note = 2'-O-methyl modified nucleotide
  modified_base 40: mod_base = OTHER; note = 2'-O-methyl modified nucleotide
  modified_base 41: mod_base = OTHER; note = 2'-O-methyl modified nucleotide with phosphorothioate linkage
  modified_base 42: mod_base = OTHER; note = 2'-O-methyl modified nucleotide
tgaatttctactgttgtagatgccagccttgccttgaccaat

SEQ ID NO: 453 - RNA, 42 nt, synthetic construct
  source 1..42: mol_type = other RNA
  modified_base 1: mod_base = OTHER; note = 2'-O-methyl modified nucleotide with phosphorothioate linkage
  modified_base 2: mod_base = OTHER; note = 2'-O-methyl modified nucleotide with phosphorothioate linkage
  modified_base 3: mod_base = OTHER; note = 2'-O-methyl modified nucleotide
  modified_base 40: mod_base = OTHER; note = 2'-O-methyl modified nucleotide
  modified_base 41: mod_base = OTHER; note = 2'-O-methyl modified nucleotide with phosphorothioate linkage
  modified_base 42: mod_base = OTHER; note = 2'-O-methyl modified nucleotide
tgaatttctactgttgtagatgtcaagtttgccttgtcaagg

SEQ ID NO: 454 - RNA, 42 nt, synthetic construct
  source 1..42: mol_type = other RNA
  modified_base 1: mod_base = OTHER; note = 2'-O-methyl modified nucleotide with phosphorothioate linkage
  modified_base 2: mod_base = OTHER; note = 2'-O-methyl modified nucleotide with phosphorothioate linkage
  modified_base 3: mod_base = OTHER; note = 2'-O-methyl modified nucleotide
  modified_base 40: mod_base = OTHER; note = 2'-O-methyl modified nucleotide
  modified_base 41: mod_base = OTHER; note = 2'-O-methyl modified nucleotide with phosphorothioate linkage
  modified_base 42: mod_base = OTHER; note = 2'-O-methyl modified nucleotide
tgaatttctactgttgtagatccttgaccaatagccttgaca

SEQ ID NO: 455 - RNA, 42 nt, synthetic construct
  source 1..42: mol_type = other RNA
  modified_base 1: mod_base = OTHER; note = 2'-O-methyl modified nucleotide with phosphorothioate linkage
  modified_base 2: mod_base = OTHER; note = 2'-O-methyl modified nucleotide with phosphorothioate linkage
  modified_base 3: mod_base = OTHER; note = 2'-O-methyl modified nucleotide
  modified_base 40: mod_base = OTHER; note = 2'-O-methyl modified nucleotide
  modified_base 41: mod_base = OTHER; note = 2'-O-methyl modified nucleotide with phosphorothioate linkage
  modified_base 42: mod_base = OTHER; note = 2'-O-methyl modified nucleotide
tgaatttctactgttgtagataccaatagccttgacaaggca

SEQ ID NO: 456 - RNA, 42 nt, synthetic construct
  source 1..42: mol_type = other RNA
  modified_base 1: mod_base = OTHER; note = 2'-O-methyl modified nucleotide with phosphorothioate linkage
  modified_base 2: mod_base = OTHER; note = 2'-O-methyl modified nucleotide with phosphorothioate linkage
  modified_base 3: mod_base = OTHER; note = 2'-O-methyl modified nucleotide
  modified_base 40: mod_base = OTHER; note = 2'-O-methyl modified nucleotide
  modified_base 41: mod_base = OTHER; note = 2'-O-methyl modified nucleotide with phosphorothioate linkage
  modified_base 42: mod_base = OTHER; note = 2'-O-methyl modified nucleotide
tgaatttctactgttgtagatacaaggcaaacttgaccaata

SEQ ID NO: 457 - RNA, 42 nt, synthetic construct
  source 1..42: mol_type = other RNA
  modified_base 1: mod_base = OTHER; note = 2'-O-methyl modified nucleotide with phosphorothioate linkage
  modified_base 2: mod_base = OTHER; note = 2'-O-methyl modified nucleotide with phosphorothioate linkage
  modified_base 3: mod_base = OTHER; note = 2'-O-methyl modified nucleotide
  modified_base 40: mod_base = OTHER; note = 2'-O-methyl modified nucleotide
  modified_base 41: mod_base = OTHER; note = 2'-O-methyl modified nucleotide with phosphorothioate linkage
  modified_base 42: mod_base = OTHER; note = 2'-O-methyl modified nucleotide
tgaatttctactgttgtagataccaatagtcttagagtatcc

SEQ ID NO: 458 - RNA, 42 nt, synthetic construct
  source 1..42: mol_type = other RNA
  modified_base 1: mod_base = OTHER; note = 2'-O-methyl modified nucleotide with phosphorothioate linkage
  modified_base 2: mod_base = OTHER; note = 2'-O-methyl modified nucleotide with phosphorothioate linkage
  modified_base 3: mod_base = OTHER; note = 2'-O-methyl modified nucleotide
  modified_base 40: mod_base = OTHER; note = 2'-O-methyl modified nucleotide
  modified_base 41: mod_base = OTHER; note = 2'-O-methyl modified nucleotide with phosphorothioate linkage
  modified_base 42: mod_base = OTHER; note = 2'-O-methyl modified nucleotide
tgaatttctactgttgtagatgagtatccagtgaggccaggg

SEQ ID NO: 459 - RNA, 42 nt, synthetic construct
  source 1..42: mol_type = other RNA
  modified_base 1: mod_base = OTHER; note = 2'-O-methyl modified nucleotide with phosphorothioate linkage
  modified_base 2: mod_base = OTHER; note = 2'-O-methyl modified nucleotide with phosphorothioate linkage
  modified_base 3: mod_base = OTHER; note = 2'-O-methyl modified nucleotide
  modified_base 40: mod_base = OTHER; note = 2'-O-methyl modified nucleotide
  modified_base 41: mod_base = OTHER; note = 2'-O-methyl modified nucleotide with phosphorothioate linkage
  modified_base 42: mod_base = OTHER; note = 2'-O-methyl modified nucleotide
tgaatttctactgttgtagatatccctagccagccgccggcc

SEQ ID NO: 460 - RNA, 42 nt, synthetic construct
  source 1..42: mol_type = other RNA
  modified_base 1: mod_base = OTHER; note = 2'-O-methyl modified nucleotide with phosphorothioate linkage
  modified_base 2: mod_base = OTHER; note = 2'-O-methyl modified nucleotide with phosphorothioate linkage
  modified_base 3: mod_base = OTHER; note = 2'-O-methyl modified nucleotide
  modified_base 40: mod_base = OTHER; note = 2'-O-methyl modified nucleotide
  modified_base 41: mod_base = OTHER; note = 2'-O-methyl modified nucleotide with phosphorothioate linkage
  modified_base 42: mod_base = OTHER; note = 2'-O-methyl modified nucleotide
tgaatttctactgttgtagatttcatccctagccagccgccg

SEQ ID NO: 461 - RNA, 42 nt, synthetic construct
  source 1..42: mol_type = other RNA
  modified_base 1: mod_base = OTHER; note = 2'-O-methyl modified nucleotide with phosphorothioate linkage
  modified_base 2: mod_base = OTHER; note = 2'-O-methyl modified nucleotide with phosphorothioate linkage
  modified_base 3: mod_base = OTHER; note = 2'-O-methyl modified nucleotide
  modified_base 40: mod_base = OTHER; note = 2'-O-methyl modified nucleotide
  modified_base 41: mod_base = OTHER; note = 2'-O-methyl modified nucleotide with phosphorothioate linkage
  modified_base 42: mod_base = OTHER; note = 2'-O-methyl modified nucleotide
tgaatttctactgttgtagatttcttcatccctagccagccg

SEQ ID NO: 462 - RNA, 42 nt, synthetic construct
  source 1..42: mol_type = other RNA
  modified_base 1: mod_base = OTHER; note = 2'-O-methyl modified nucleotide with phosphorothioate linkage
  modified_base 2: mod_base = OTHER; note = 2'-O-methyl modified nucleotide with phosphorothioate linkage
  modified_base 3: mod_base = OTHER; note = 2'-O-methyl modified nucleotide
  modified_base 40: mod_base = OTHER; note = 2'-O-methyl modified nucleotide
  modified_base 41: mod_base = OTHER; note = 2'-O-methyl modified nucleotide with phosphorothioate linkage
  modified_base 42: mod_base = OTHER; note = 2'-O-methyl modified nucleotide
tgaatttctactgttgtagatattcttcatccctagccagcc

SEQ ID NO: 463 - RNA, 42 nt, synthetic construct
  source 1..42: mol_type = other RNA
  modified_base 1: mod_base = OTHER; note = 2'-O-methyl modified nucleotide with phosphorothioate linkage
  modified_base 2: mod_base = OTHER; note = 2'-O-methyl modified nucleotide with phosphorothioate linkage
  modified_base 3: mod_base = OTHER; note = 2'-O-methyl modified nucleotide
  modified_base 40: mod_base = OTHER; note = 2'-O-methyl modified nucleotide
  modified_base 41: mod_base = OTHER; note = 2'-O-methyl modified nucleotide with phosphorothioate linkage
  modified_base 42: mod_base = OTHER; note = 2'-O-methyl modified nucleotide
tgaatttctactgttgtagattattcttcatccctagccagc

SEQ ID NO: 464 - RNA, 42 nt, synthetic construct
  source 1..42: mol_type = other RNA
  modified_base 1: mod_base = OTHER; note = 2'-O-methyl modified nucleotide with phosphorothioate linkage
  modified_base 2: mod_base = OTHER; note = 2'-O-methyl modified nucleotide with phosphorothioate linkage
  modified_base 3: mod_base = OTHER; note = 2'-O-methyl modified nucleotide
  modified_base 40: mod_base = OTHER; note = 2'-O-methyl modified nucleotide
  modified_base 41: mod_base = OTHER; note = 2'-O-methyl modified nucleotide with phosphorothioate linkage
  modified_base 42: mod_base = OTHER; note = 2'-O-methyl modified nucleotide
tgaatttctactgttgtagatcttttattcttcatccctagc

SEQ ID NO: 465 - RNA, 42 nt, synthetic construct
  source 1..42: mol_type = other RNA
  modified_base 1: mod_base = OTHER; note = 2'-O-methyl modified nucleotide with phosphorothioate linkage
  modified_base 2: mod_base = OTHER; note = 2'-O-methyl modified nucleotide with phosphorothioate linkage
  modified_base 3: mod_base = OTHER; note = 2'-O-methyl modified nucleotide
  modified_base 40: mod_base = OTHER; note = 2'-O-methyl modified nucleotide
  modified_base 41: mod_base = OTHER; note = 2'-O-methyl modified nucleotide with phosphorothioate linkage
  modified_base 42: mod_base = OTHER; note = 2'-O-methyl modified nucleotide
tgaatttctactgttgtagatcagaagcgagtgtgtggaact

SEQ ID NO: 466 - RNA, 42 nt, synthetic construct
  source 1..42: mol_type = other RNA
  modified_base 1: mod_base = OTHER; note = 2'-O-methyl modified nucleotide with phosphorothioate linkage
  modified_base 2: mod_base = OTHER; note = 2'-O-methyl modified nucleotide with phosphorothioate linkage
  modified_base 3: mod_base = OTHER; note = 2'-O-methyl modified nucleotide
  modified_base 40: mod_base = OTHER; note = 2'-O-methyl modified nucleotide
  modified_base 41: mod_base = OTHER; note = 2'-O-methyl modified nucleotide with phosphorothioate linkage
  modified_base 42: mod_base = OTHER; note = 2'-O-methyl modified nucleotide
tgaatttctactgttgtagatagcagttccacacactcgctt

SEQ ID NO: 467 - RNA, 42 nt, synthetic construct
  source 1..42: mol_type = other RNA
  modified_base 1: mod_base = OTHER; note = 2'-O-methyl modified nucleotide with phosphorothioate linkage
  modified_base 2: mod_base = OTHER; note = 2'-O-methyl modified nucleotide with phosphorothioate linkage
  modified_base 3: mod_base = OTHER; note = 2'-O-methyl modified nucleotide
  modified_base 40: mod_base = OTHER; note = 2'-O-methyl modified nucleotide
  modified_base 41: mod_base = OTHER; note = 2'-O-methyl modified nucleotide with phosphorothioate linkage
  modified_base 42: mod_base = OTHER; note = 2'-O-methyl modified nucleotide
tgaatttctactgttgtagatataacctcagacgttccagaa

SEQ ID NO: 468 - RNA, 42 nt, synthetic construct
  source 1..42: mol_type = other RNA
  modified_base 1: mod_base = OTHER; note = 2'-O-methyl modified nucleotide with phosphorothioate linkage
  modified_base 2: mod_base = OTHER; note = 2'-O-methyl modified nucleotide with phosphorothioate linkage
  modified_base 3: mod_base = OTHER; note = 2'-O-methyl modified nucleotide
  modified_base 40: mod_base = OTHER; note = 2'-O-methyl modified nucleotide
  modified_base 41: mod_base = OTHER; note = 2'-O-methyl modified nucleotide with phosphorothioate linkage
  modified_base 42: mod_base = OTHER; note = 2'-O-methyl modified nucleotide
tgaatttctactgttgtagatttgataacctcagacgttcca

SEQ ID NO: 469 - RNA, 42 nt, synthetic construct
  source 1..42: mol_type = other RNA
  modified_base 1: mod_base = OTHER; note = 2'-O-methyl modified nucleotide with phosphorothioate linkage
  modified_base 2: mod_base = OTHER; note = 2'-O-methyl modified nucleotide with phosphorothioate linkage
  modified_base 3: mod_base = OTHER; note = 2'-O-methyl modified nucleotide
  modified_base 40: mod_base = OTHER; note = 2'-O-methyl modified nucleotide
  modified_base 41: mod_base = OTHER; note = 2'-O-methyl modified nucleotide with phosphorothioate linkage
  modified_base 42: mod_base = OTHER; note = 2'-O-methyl modified nucleotide
tgaatttctactgttgtagatcacacactcgcttctggaacg

SEQ ID NO: 470 - RNA, 42 nt, synthetic construct
  source 1..42: mol_type = other RNA
  modified_base 1: mod_base = OTHER; note = 2'-O-methyl modified nucleotide with phosphorothioate linkage
  modified_base 2: mod_base = OTHER; note = 2'-O-methyl modified nucleotide with phosphorothioate linkage
  modified_base 3: mod_base = OTHER; note = 2'-O-methyl modified nucleotide
  modified_base 40: mod_base = OTHER; note = 2'-O-methyl modified nucleotide
  modified_base 41: mod_base = OTHER; note = 2'-O-methyl modified nucleotide with phosphorothioate linkage
  modified_base 42: mod_base = OTHER; note = 2'-O-methyl modified nucleotide
tgaatttctactgttgtagattggaacgtctgaggttatcaa

SEQ ID NO: 471 - RNA, 42 nt, synthetic construct
  source 1..42: mol_type = other RNA
  modified_base 1: mod_base = OTHER; note = 2'-O-methyl modified nucleotide with phosphorothioate linkage
  modified_base 2: mod_base = OTHER; note = 2'-O-methyl modified nucleotide with phosphorothioate linkage
  modified_base 3: mod_base = OTHER; note = 2'-O-methyl modified nucleotide
  modified_base 40: mod_base = OTHER; note = 2'-O-methyl modified nucleotide
  modified_base 41: mod_base = OTHER; note = 2'-O-methyl modified nucleotide with phosphorothioate linkage
  modified_base 42: mod_base = OTHER; note = 2'-O-methyl modified nucleotide
tgaatttctactgttgtagattcaataagctcctagtccaga

SEQ ID NO: 472 - RNA, 42 nt, synthetic construct
  source 1..42: mol_type = other RNA
  modified_base 1: mod_base = OTHER; note = 2'-O-methyl modified nucleotide with phosphorothioate linkage
  modified_base 2: mod_base = OTHER; note = 2'-O-methyl modified nucleotide with phosphorothioate linkage
  modified_base 3: mod_base = OTHER; note = 2'-O-methyl modified nucleotide
  modified_base 40: mod_base = OTHER; note = 2'-O-methyl modified nucleotide
  modified_base 41: mod_base = OTHER; note = 2'-O-methyl modified nucleotide with phosphorothioate linkage
  modified_base 42: mod_base = OTHER; note = 2'-O-methyl modified nucleotide
tgaatttctactgttgtagatcactggaatcagctatctgct

SEQ ID NO: 473 - RNA, 42 nt, synthetic construct
  source 1..42: mol_type = other RNA
  modified_base 1: mod_base = OTHER; note = 2'-O-methyl modified nucleotide with phosphorothioate linkage
  modified_base 2: mod_base = OTHER; note = 2'-O-methyl modified nucleotide with phosphorothioate linkage
  modified_base 3: mod_base = OTHER; note = 2'-O-methyl modified nucleotide
  modified_base 40: mod_base = OTHER; note = 2'-O-methyl modified nucleotide
  modified_base 41: mod_base = OTHER; note = 2'-O-methyl modified nucleotide with phosphorothioate linkage
  modified_base 42: mod_base = OTHER; note = 2'-O-methyl modified nucleotide
tgaatttctactgttgtagatgcactggaatcagctatctgc

SEQ ID NO: 474 - RNA, 42 nt, synthetic construct
  source 1..42: mol_type = other RNA
  modified_base 1: mod_base = OTHER; note = 2'-O-methyl modified nucleotide with phosphorothioate linkage
  modified_base 2: mod_base = OTHER; note = 2'-O-methyl modified nucleotide with phosphorothioate linkage
  modified_base 3: mod_base = OTHER; note = 2'-O-methyl modified nucleotide
  modified_base 40: mod_base = OTHER; note = 2'-O-methyl modified nucleotide
  modified_base 41: mod_base = OTHER; note = 2'-O-methyl modified nucleotide with phosphorothioate linkage
  modified_base 42: mod_base = OTHER; note = 2'-O-methyl modified nucleotide
tgaatttctactgttgtagatcctgtatggactttgcactgg

SEQ ID NO: 475 - RNA, 42 nt, synthetic construct
  source 1..42: mol_type = other RNA
  modified_base 1: mod_base = OTHER; note = 2'-O-methyl modified nucleotide with phosphorothioate linkage
  modified_base 2: mod_base = OTHER; note = 2'-O-methyl modified nucleotide with phosphorothioate linkage
  modified_base 3: mod_base = OTHER; note = 2'-O-methyl modified nucleotide
  modified_base 40: mod_base = OTHER; note = 2'-O-methyl modified nucleotide
  modified_base 41: mod_base = OTHER; note = 2'-O-methyl modified nucleotide with phosphorothioate linkage
  modified_base 42: mod_base = OTHER; note = 2'-O-methyl modified nucleotide
tgaatttctactgttgtagatttacctgtatggactttgcac

SEQ ID NO: 476 - RNA, 42 nt, synthetic construct
  source 1..42: mol_type = other RNA
  modified_base 1: mod_base = OTHER; note = 2'-O-methyl modified nucleotide with phosphorothioate linkage
  modified_base 2: mod_base = OTHER; note = 2'-O-methyl modified nucleotide with phosphorothioate linkage
  modified_base 3: mod_base = OTHER; note = 2'-O-methyl modified nucleotide
  modified_base 40: mod_base = OTHER; note = 2'-O-methyl modified nucleotide
  modified_base 41: mod_base = OTHER; note = 2'-O-methyl modified nucleotide with phosphorothioate linkage
  modified_base 42: mod_base = OTHER; note = 2'-O-methyl modified nucleotide
tgaatttctactgttgtagattggcctatgttattacctgta

SEQ ID NO: 477 - RNA, 42 nt, synthetic construct
  source 1..42: mol_type = other RNA
  modified_base 1: mod_base = OTHER; note = 2'-O-methyl modified nucleotide with phosphorothioate linkage
  modified_base 2: mod_base = OTHER; note = 2'-O-methyl modified nucleotide with phosphorothioate linkage
  modified_base 3: mod_base = OTHER; note = 2'-O-methyl modified nucleotide
  modified_base 40: mod_base = OTHER; note = 2'-O-methyl modified nucleotide
  modified_base 41: mod_base = OTHER; note = 2'-O-methyl modified nucleotide with phosphorothioate linkage
  modified_base 42: mod_base = OTHER; note = 2'-O-methyl modified nucleotide
tgaatttctactgttgtagatctggcctatgttattacctgt

SEQ ID NO: 478 - RNA, 42 nt, synthetic construct
  source 1..42: mol_type = other RNA
  modified_base 1: mod_base = OTHER; note = 2'-O-methyl modified nucleotide with phosphorothioate linkage
  modified_base 2: mod_base = OTHER; note = 2'-O-methyl modified nucleotide with phosphorothioate linkage
  modified_base 3: mod_base = OTHER; note = 2'-O-methyl modified nucleotide
  modified_base 40: mod_base = OTHER; note = 2'-O-methyl modified nucleotide
  modified_base 41: mod_base = OTHER; note = 2'-O-methyl modified nucleotide with phosphorothioate linkage
  modified_base 42: mod_base = OTHER; note = 2'-O-methyl modified nucleotide
tgaatttctactgttgtagattctggcctatgttattacctg

SEQ ID NO: 479 - RNA, 42 nt, synthetic construct
  source 1..42: mol_type = other RNA
  modified_base 1: mod_base = OTHER; note = 2'-O-methyl modified nucleotide with phosphorothioate linkage
  modified_base 2: mod_base = OTHER; note = 2'-O-methyl modified nucleotide with phosphorothioate linkage
  modified_base 3: mod_base = OTHER; note = 2'-O-methyl modified nucleotide
  modified_base 40: mod_base = OTHER; note = 2'-O-methyl modified nucleotide
  modified_base 41: mod_base = OTHER; note = 2'-O-methyl modified nucleotide with phosphorothioate linkage
  modified_base 42: mod_base = OTHER; note = 2'-O-methyl modified nucleotide
tgaatttctactgttgtagatcagtgcaaagtccatacaggt

SEQ ID NO: 480 - RNA, 42 nt, synthetic construct
  source 1..42: mol_type = other RNA
  modified_base 1: mod_base = OTHER; note = 2'-O-methyl modified nucleotide with phosphorothioate linkage
  modified_base 2: mod_base = OTHER; note = 2'-O-methyl modified nucleotide with phosphorothioate linkage
  modified_base 3: mod_base = OTHER; note = 2'-O-methyl modified nucleotide
  modified_base 40: mod_base = OTHER; note = 2'-O-methyl modified nucleotide
  modified_base 41: mod_base = OTHER; note = 2'-O-methyl modified nucleotide with phosphorothioate linkage
  modified_base 42: mod_base = OTHER; note = 2'-O-methyl modified nucleotide
tgaatttctactgttgtagattgtctaagagtagatgccata

SEQ ID NO: 481 - RNA, 42 nt, synthetic construct
  source 1..42: mol_type = other RNA
  modified_base 1: mod_base = OTHER; note = 2'-O-methyl modified nucleotide with phosphorothioate linkage
  modified_base 2: mod_base = OTHER; note = 2'-O-methyl modified nucleotide with phosphorothioate linkage
  modified_base 3: mod_base = OTHER; note = 2'-O-methyl modified nucleotide
  modified_base 40: mod_base = OTHER; note = 2'-O-methyl modified nucleotide
  modified_base 41: mod_base = OTHER; note = 2'-O-methyl modified nucleotide with phosphorothioate linkage
  modified_base 42: mod_base = OTHER; note = 2'-O-methyl modified nucleotide
tgaatttctactgttgtagataccctggtgtgttatgtctaa

SEQ ID NO: 482 - RNA, 42 nt, synthetic construct
  source 1..42: mol_type = other RNA
  modified_base 1: mod_base = OTHER; note = 2'-O-methyl modified nucleotide with phosphorothioate linkage
  modified_base 2: mod_base = OTHER; note = 2'-O-methyl modified nucleotide with phosphorothioate linkage
  modified_base 3: mod_base = OTHER; note = 2'-O-methyl modified nucleotide
  modified_base 40: mod_base = OTHER; note = 2'-O-methyl modified nucleotide
  modified_base 41: mod_base = OTHER; note = 2'-O-methyl modified nucleotide with phosphorothioate linkage
  modified_base 42: mod_base = OTHER; note = 2'-O-methyl modified nucleotide
tgaatttctactgttgtagattattgaccctggtgtgttatg

SEQ ID NO: 483 - RNA, 42 nt, synthetic construct
  source 1..42: mol_type = other RNA
  modified_base 1: mod_base = OTHER; note = 2'-O-methyl modified nucleotide with phosphorothioate linkage
  modified_base 2: mod_base = OTHER; note = 2'-O-methyl modified nucleotide with phosphorothioate linkage
  modified_base 3: mod_base = OTHER; note = 2'-O-methyl modified nucleotide
  modified_base 40: mod_base = OTHER; note = 2'-O-methyl modified nucleotide
  modified_base 41: mod_base = OTHER; note = 2'-O-methyl modified nucleotide with phosphorothioate linkage
  modified_base 42: mod_base = OTHER; note = 2'-O-methyl modified nucleotide
tgaatttctactgttgtagataaagttgtattgaccctggtg

SEQ ID NO: 484 - RNA, 42 nt, synthetic construct
  source 1..42: mol_type = other RNA
  modified_base 1: mod_base = OTHER; note = 2'-O-methyl modified nucleotide with phosphorothioate linkage
  modified_base 2: mod_base = OTHER; note = 2'-O-methyl modified nucleotide with phosphorothioate linkage
  modified_base 3: mod_base = OTHER; note = 2'-O-methyl modified nucleotide
  modified_base 40: mod_base = OTHER; note = 2'-O-methyl modified nucleotide
  modified_base 41: mod_base = OTHER; note = 2'-O-methyl modified nucleotide with phosphorothioate linkage
  modified_base 42: mod_base = OTHER; note = 2'-O-methyl modified nucleotide
tgaatttctactgttgtagatgacataacacaccagggtcaa

SEQ ID NO: 485 - RNA, 42 nt, synthetic construct
  source 1..42: mol_type = other RNA
  modified_base 1: mod_base = OTHER; note = 2'-O-methyl modified nucleotide with phosphorothioate linkage
  modified_base 2: mod_base = OTHER; note = 2'-O-methyl modified nucleotide with phosphorothioate linkage
  modified_base 3: mod_base = OTHER; note = 2'-O-methyl modified nucleotide
  modified_base 40: mod_base = OTHER; note = 2'-O-methyl modified nucleotide
  modified_base 41: mod_base = OTHER; note = 2'-O-methyl modified nucleotide with phosphorothioate linkage
  modified_base 42: mod_base = OTHER; note = 2'-O-methyl modified nucleotide
tgaatttctactgttgtagatcactagactagcttcaaagtt

SEQ ID NO: 486 - RNA, 42 nt, synthetic construct
  source 1..42: mol_type = other RNA
  modified_base 1: mod_base = OTHER; note = 2'-O-methyl modified nucleotide with phosphorothioate linkage
  modified_base 2: mod_base = OTHER; note = 2'-O-methyl modified nucleotide with phosphorothioate linkage
  modified_base 3: mod_base = OTHER; note = 2'-O-methyl modified nucleotide
  modified_base 40: mod_base = OTHER; note = 2'-O-methyl modified nucleotide
  modified_base 41: mod_base = OTHER; note = 2'-O-methyl modified nucleotide with phosphorothioate linkage
  modified_base 42: mod_base = OTHER; note = 2'-O-methyl modified nucleotide
tgaatttctactgttgtagatgcttgcactagactagcttca

SEQ ID NO: 487 - RNA, 42 nt, synthetic construct
  source 1..42: mol_type = other RNA
  modified_base 1: mod_base = OTHER; note = 2'-O-methyl modified nucleotide with phosphorothioate linkage
  modified_base 2: mod_base = OTHER; note = 2'-O-methyl modified nucleotide with phosphorothioate linkage
  modified_base 3: mod_base = OTHER; note = 2'-O-methyl modified nucleotide
  modified_base 40: mod_base = OTHER; note = 2'-O-methyl modified nucleotide
  modified_base 41: mod_base = OTHER; note = 2'-O-methyl modified nucleotide with phosphorothioate linkage
  modified_base 42: mod_base = OTHER; note = 2'-O-methyl modified nucleotide
tgaatttctactgttgtagatgaagctagtctagtgcaagct

SEQ ID NO: 488 - RNA, 42 nt, synthetic construct
  source 1..42: mol_type = other RNA
  modified_base 1: mod_base = OTHER; note = 2'-O-methyl modified nucleotide with phosphorothioate linkage
  modified_base 2: mod_base = OTHER; note = 2'-O-methyl modified nucleotide with phosphorothioate linkage
  modified_base 3: mod_base = OTHER; note = 2'-O-methyl modified nucleotide
  modified_base 40: mod_base = OTHER; note = 2'-O-methyl modified nucleotide
  modified_base 41: mod_base = OTHER; note = 2'-O-methyl modified nucleotide with phosphorothioate linkage
  modified_base 42: mod_base = OTHER; note = 2'-O-methyl modified nucleotide
tgaatttctactgttgtagataagctagtctagtgcaagcta

SEQ ID NO: 489 - RNA, 42 nt, synthetic construct
  source 1..42: mol_type = other RNA
  modified_base 1: mod_base = OTHER; note = 2'-O-methyl modified nucleotide with phosphorothioate linkage
  modified_base 2: mod_base = OTHER; note = 2'-O-methyl modified nucleotide with phosphorothioate linkage
  modified_base 3: mod_base = OTHER; note = 2'-O-methyl modified nucleotide
  modified_base 40: mod_base = OTHER; note = 2'-O-methyl modified nucleotide
  modified_base 41: mod_base = OTHER; note = 2'-O-methyl modified nucleotide with phosphorothioate linkage
  modified_base 42: mod_base = OTHER; note = 2'-O-methyl modified nucleotide
tgaatttctactgttgtagatctggagcctgtgataaaagca

SEQ ID NO: 490 - RNA, 42 nt, synthetic construct
  source 1..42: mol_type = other RNA
  modified_base 1: mod_base = OTHER; note = 2'-O-methyl modified nucleotide with phosphorothioate linkage
  modified_base 2: mod_base = OTHER; note = 2'-O-methyl modified nucleotide with phosphorothioate linkage
  modified_base 3: mod_base = OTHER; note = 2'-O-methyl modified nucleotide
  modified_base 40: mod_base = OTHER; note = 2'-O-methyl modified nucleotide
  modified_base 41: mod_base = OTHER; note = 2'-O-methyl modified nucleotide with phosphorothioate linkage
  modified_base 42: mod_base = OTHER; note = 2'-O-methyl modified nucleotide
tgaatttctactgttgtagatcttttatcacaggctccagga

SEQ ID NO: 491 - RNA, 42 nt, synthetic construct
  source 1..42: mol_type = other RNA
  modified_base 1: mod_base = OTHER; note = 2'-O-methyl modified nucleotide with phosphorothioate linkage
  modified_base 2: mod_base = OTHER; note = 2'-O-methyl modified nucleotide with phosphorothioate linkage
  modified_base 3: mod_base = OTHER; note = 2'-O-methyl modified nucleotide
  modified_base 40: mod_base = OTHER; note = 2'-O-methyl modified nucleotide
  modified_base 41: mod_base = OTHER; note = 2'-O-methyl modified nucleotide with phosphorothioate linkage
  modified_base 42: mod_base = OTHER; note = 2'-O-methyl modified nucleotide
tgaatttctactgttgtagattatcacaggctccaggaaggg

SEQ ID NO: 492 - RNA, 42 nt, synthetic construct
  source 1..42: mol_type = other RNA
  modified_base 1: mod_base = OTHER; note = 2'-O-methyl modified nucleotide with phosphorothioate linkage
  modified_base 2: mod_base = OTHER; note = 2'-O-methyl modified nucleotide with phosphorothioate linkage
  modified_base 3: mod_base = OTHER; note = 2'-O-methyl modified nucleotide
  modified_base 40: mod_base = OTHER; note = 2'-O-methyl modified nucleotide
  modified_base 41: mod_base = OTHER; note = 2'-O-methyl modified nucleotide with phosphorothioate linkage
  modified_base 42: mod_base = OTHER; note = 2'-O-methyl modified nucleotide
tgaatttctactgttgtagattaccccacccacgcccccacc

SEQ ID NO: 493 - RNA, 42 nt, synthetic construct
  source 1..42: mol_type = other RNA
  modified_base 1: mod_base = OTHER; note = 2'-O-methyl modified nucleotide with phosphorothioate linkage
  modified_base 2: mod_base = OTHER; note = 2'-O-methyl modified nucleotide with phosphorothioate linkage
  modified_base 3: mod_base = OTHER; note = 2'-O-methyl modified nucleotide
  modified_base 40: mod_base = OTHER; note = 2'-O-methyl modified nucleotide
  modified_base 41: mod_base = OTHER; note = 2'-O-methyl modified nucleotide with phosphorothioate linkage
  modified_base 42: mod_base = OTHER; note = 2'-O-methyl modified nucleotide
tgaatttctactgttgtagatggcctctgattagggtggggg

SEQ ID NO: 494 - RNA, 42 nt, synthetic construct
  source 1..42: mol_type = other RNA
  modified_base 1: mod_base = OTHER; note = 2'-O-methyl modified nucleotide with phosphorothioate linkage
  modified_base 2: mod_base = OTHER; note = 2'-O-methyl modified nucleotide with phosphorothioate linkage
  modified_base 3: mod_base = OTHER; note = 2'-O-methyl modified nucleotide
  modified_base 40: mod_base = OTHER; note = 2'-O-methyl modified nucleotide
  modified_base 41: mod_base = OTHER; note = 2'-O-methyl modified nucleotide with phosphorothioate linkage
  modified_base 42: mod_base = OTHER; note = 2'-O-methyl modified nucleotide
tgaatttctactgttgtagatgggtgggggcgtgggtggggt

SEQ ID NO: 495 - RNA, 42 nt, synthetic construct
  source 1..42: mol_type = other RNA
  modified_base 1: mod_base = OTHER; note = 2'-O-methyl modified nucleotide with phosphorothioate linkage
  modified_base 2: mod_base = OTHER; note = 2'-O-methyl modified nucleotide with phosphorothioate linkage
  modified_base 3: mod_base = OTHER; note = 2'-O-methyl modified nucleotide
  modified_base 40: mod_base = OTHER; note = 2'-O-methyl modified nucleotide
  modified_base 41: mod_base = OTHER; note = 2'-O-methyl modified nucleotide with phosphorothioate linkage
  modified_base 42: mod_base = OTHER; note = 2'-O-methyl modified nucleotide
tgaatttctactgttgtagatcgaaagaggcccccctgggca

SEQ ID NO: 496 - RNA, 42 nt, synthetic construct
  source 1..42: mol_type = other RNA
  modified_base 1: mod_base = OTHER; note = 2'-O-methyl modified nucleotide with phosphorothioate linkage
  modified_base 2: mod_base = OTHER; note = 2'-O-methyl modified nucleotide with phosphorothioate linkage
  modified_base 3: mod_base = OTHER; note = 2'-O-methyl modified nucleotide
  modified_base 40: mod_base = OTHER; note = 2'-O-methyl modified nucleotide
  modified_base 41: mod_base = OTHER; note = 2'-O-methyl modified nucleotide with phosphorothioate linkage
  modified_base 42: mod_base = OTHER; note = 2'-O-methyl modified nucleotide
tgaatttctactgttgtagatgcccaggggggcctctttcgg

SEQ ID NO: 497 - RNA, 42 nt, synthetic construct
  source 1..42: mol_type = other RNA
  modified_base 1: mod_base = OTHER; note = 2'-O-methyl modified nucleotide with phosphorothioate linkage
  modified_base 2: mod_base = OTHER; note = 2'-O-methyl modified nucleotide with phosphorothioate linkage
  modified_base 3: mod_base = OTHER; note = 2'-O-methyl modified nucleotide
  modified_base 40: mod_base = OTHER; note = 2'-O-methyl modified nucleotide
  modified_base 41: mod_base = OTHER; note = 2'-O-methyl modified nucleotide with phosphorothioate linkage
  modified_base 42: mod_base = OTHER; note = 2'-O-methyl modified nucleotide
tgaatttctactgttgtagatcccaggggggcctctttcgga

SEQ ID NO: 498 - RNA, 42 nt, synthetic construct
  source 1..42: mol_type = other RNA
  modified_base 1: mod_base = OTHER; note = 2'-O-methyl modified nucleotide with phosphorothioate linkage
  modified_base 2: mod_base = OTHER; note = 2'-O-methyl modified nucleotide with phosphorothioate linkage
  modified_base 3: mod_base = OTHER; note = 2'-O-methyl modified nucleotide
  modified_base 40: mod_base = OTHER; note = 2'-O-methyl modified nucleotide
  modified_base 41: mod_base = OTHER; note = 2'-O-methyl modified nucleotide with phosphorothioate linkage
  modified_base 42: mod_base = OTHER; note = 2'-O-methyl modified nucleotide
tgaatttctactgttgtagattccatcaccaagagagccttc

SEQ ID NO: 499 - RNA, 42 nt, synthetic construct
  source 1..42: mol_type = other RNA
  modified_base 1: mod_base = OTHER; note = 2'-O-methyl modified nucleotide with phosphorothioate linkage
  modified_base 2: mod_base = OTHER; note = 2'-O-methyl modified nucleotide with phosphorothioate linkage
  modified_base 3: mod_base = OTHER; note = 2'-O-methyl modified nucleotide
  modified_base 40: mod_base = OTHER; note = 2'-O-methyl modified nucleotide
  modified_base 41: mod_base = OTHER; note = 2'-O-methyl modified nucleotide with phosphorothioate linkage
  modified_base 42: mod_base = OTHER; note = 2'-O-methyl modified nucleotide
tgaatttctactgttgtagatcggaaggctctcttggtgatg

SEQ ID NO: 500 - RNA, 42 nt, synthetic construct
  source 1..42: mol_type = other RNA
  modified_base 1: mod_base = OTHER; note = 2'-O-methyl modified nucleotide with phosphorothioate linkage
  modified_base 2: mod_base = OTHER; note = 2'-O-methyl modified nucleotide with phosphorothioate linkage
  modified_base 3: mod_base = OTHER; note = 2'-O-methyl modified nucleotide
  modified_base 40: mod_base = OTHER; note = 2'-O-methyl modified nucleotide
  modified_base 41: mod_base = OTHER; note = 2'-O-methyl modified nucleotide with phosphorothioate linkage
  modified_base 42: mod_base = OTHER; note = 2'-O-methyl modified nucleotide
tgaatttctactgttgtagatggaaggctctcttggtgatgg

SEQ ID NO: 501 - RNA, 42 nt, synthetic construct
  source 1..42: mol_type = other RNA
  modified_base 1: mod_base = OTHER; note = 2'-O-methyl modified nucleotide with phosphorothioate linkage
  modified_base 2: mod_base = OTHER; note = 2'-O-methyl modified nucleotide with phosphorothioate linkage
  modified_base 3: mod_base = OTHER; note = 2'-O-methyl modified nucleotide
  modified_base 40: mod_base = OTHER; note = 2'-O-methyl modified nucleotide
  modified_base 41: mod_base = OTHER; note = 2'-O-methyl modified nucleotide with phosphorothioate linkage
  modified_base 42: mod_base = OTHER; note = 2'-O-methyl modified nucleotide
tgaatttctactgttgtagatagaaataaaatccaattctcc

SEQ ID NO: 502 - RNA, 42 nt, synthetic construct
  source 1..42: mol_type = other RNA
  modified_base 1: mod_base = OTHER; note = 2'-O-methyl modified nucleotide with phosphorothioate linkage
  modified_base 2: mod_base = OTHER; note = 2'-O-methyl modified nucleotide with phosphorothioate linkage
  modified_base 3: mod_base = OTHER; note = 2'-O-methyl modified nucleotide
  modified_base 40: mod_base = OTHER; note = 2'-O-methyl modified nucleotide
  modified_base 41: mod_base = OTHER; note = 2'-O-methyl modified nucleotide with phosphorothioate linkage
  modified_base 42: mod_base = OTHER; note = 2'-O-methyl modified nucleotide
tgaatttctactgttgtagatccattgagaaataaaatccaa

SEQ ID NO: 503 - RNA, 42 nt, synthetic construct
  source 1..42: mol_type = other RNA
  modified_base 1: mod_base = OTHER; note = 2'-O-methyl modified nucleotide with phosphorothioate linkage
  modified_base 2: mod_base = OTHER; note = 2'-O-methyl modified nucleotide with phosphorothioate linkage
  modified_base 3: mod_base = OTHER; note = 2'-O-methyl modified nucleotide
  modified_base 40: mod_base = OTHER; note = 2'-O-methyl modified nucleotide
  modified_base 41: mod_base = OTHER; note = 2'-O-methyl modified nucleotide with phosphorothioate linkage
  modified_base 42: mod_base = OTHER; note = 2'-O-methyl modified nucleotide
tgaatttctactgttgtagatattcccattgagaaataaaat

SEQ ID NO: 504 - RNA, 42 nt, synthetic construct
  source 1..42: mol_type = other RNA
  modified_base 1: mod_base = OTHER; note = 2'-O-methyl modified nucleotide with phosphorothioate linkage
  modified_base 2: mod_base = OTHER; note = 2'-O-methyl modified nucleotide with phosphorothioate linkage
  modified_base 3: mod_base = OTHER; note = 2'-O-methyl modified nucleotide
  modified_base 40: mod_base = OTHER; note = 2'-O-methyl modified nucleotide
  modified_base 41: mod_base = OTHER; note = 2'-O-methyl modified nucleotide with phosphorothioate linkage
  modified_base 42: mod_base = OTHER; note = 2'-O-methyl modified nucleotide
tgaatttctactgttgtagatcattcccattgagaaataaaa

SEQ ID NO: 505 - RNA, 42 nt, synthetic construct
  source 1..42: mol_type = other RNA
  modified_base 1: mod_base = OTHER; note = 2'-O-methyl modified nucleotide with phosphorothioate linkage
  modified_base 2: mod_base = OTHER; note = 2'-O-methyl modified nucleotide with phosphorothioate linkage
  modified_base 3: mod_base = OTHER; note = 2'-O-methyl modified nucleotide
  modified_base 40: mod_base = OTHER; note = 2'-O-methyl modified nucleotide
  modified_base 41: mod_base = OTHER; note = 2'-O-methyl modified nucleotide with phosphorothioate linkage
  modified_base 42: mod_base = OTHER; note = 2'-O-methyl modified nucleotide
tgaatttctactgttgtagatgtgatggagaattggatttta

SEQ ID NO: 506 - RNA, 42 nt, synthetic construct
  source 1..42: mol_type = other RNA
  modified_base 1: mod_base = OTHER; note = 2'-O-methyl modified nucleotide with phosphorothioate linkage
  modified_base 2: mod_base = OTHER; note = 2'-O-methyl modified nucleotide with phosphorothioate linkage
  modified_base 3: mod_base = OTHER; note = 2'-O-methyl modified nucleotide
  modified_base 40: mod_base = OTHER; note = 2'-O-methyl modified nucleotide
  modified_base 41: mod_base = OTHER; note = 2'-O-methyl modified nucleotide with phosphorothioate linkage
  modified_base 42: mod_base = OTHER; note = 2'-O-methyl modified nucleotide
tgaatttctactgttgtagattttcattcccattgagaaata

SEQ ID NO: 507 - RNA, 42 nt, synthetic construct
  source 1..42: mol_type = other RNA
  modified_base 1: mod_base = OTHER; note = 2'-O-methyl modified nucleotide with phosphorothioate linkage
  modified_base 2: mod_base = OTHER; note = 2'-O-methyl modified nucleotide with phosphorothioate linkage
  modified_base 3: mod_base = OTHER; note = 2'-O-methyl modified nucleotide
  modified_base 40: mod_base = OTHER; note = 2'-O-methyl modified nucleotide
  modified_base 41: mod_base = OTHER; note = 2'-O-methyl modified nucleotide with phosphorothioate linkage
  modified_base 42: mod_base = OTHER; note = 2'-O-methyl modified nucleotide
tgaatttctactgttgtagatgattttatttctcaatgggaa

SEQ ID NO: 508 - RNA, 42 nt, synthetic construct
  source 1..42: mol_type = other RNA
  modified_base 1: mod_base = OTHER; note = 2'-O-methyl modified nucleotide with phosphorothioate linkage
  modified_base 2: mod_base = OTHER; note = 2'-O-methyl modified nucleotide with phosphorothioate linkage
  modified_base 3: mod_base = OTHER; note = 2'-O-methyl modified nucleotide
  modified_base 40: mod_base = OTHER; note = 2'-O-methyl modified nucleotide
  modified_base 41: mod_base = OTHER; note = 2'-O-methyl modified nucleotide with phosphorothioate linkage
  modified_base 42: mod_base = OTHER; note = 2'-O-methyl modified nucleotide
tgaatttctactgttgtagattatttctcaatgggaatgaaa

SEQ ID NO: 509 - RNA, 42 nt, synthetic construct
  source 1..42: mol_type = other RNA
  modified_base 1: mod_base = OTHER; note = 2'-O-methyl modified nucleotide with phosphorothioate linkage
  modified_base 2: mod_base = OTHER; note = 2'-O-methyl modified nucleotide with phosphorothioate linkage
  modified_base 3: mod_base = OTHER; note = 2'-O-methyl modified nucleotide
  modified_base 40: mod_base = OTHER; note = 2'-O-methyl modified nucleotide
  modified_base 41: mod_base = OTHER; note = 2'-O-methyl modified nucleotide with phosphorothioate linkage
  modified_base 42: mod_base = OTHER; note = 2'-O-methyl modified nucleotide
tgaatttctactgttgtagatatttctcaatgggaatgaaat

SEQ ID NO: 510 - RNA, 42 nt, synthetic construct
  source 1..42: mol_type = other RNA
  modified_base 1: mod_base = OTHER; note = 2'-O-methyl modified nucleotide with phosphorothioate linkage
  modified_base 2: mod_base = OTHER; note = 2'-O-methyl modified nucleotide with phosphorothioate linkage
  modified_base 3: mod_base = OTHER; note = 2'-O-methyl modified nucleotide
  modified_base 40: mod_base = OTHER; note = 2'-O-methyl modified nucleotide
  modified_base 41: mod_base = OTHER; note = 2'-O-methyl modified nucleotide with phosphorothioate linkage
  modified_base 42: mod_base = OTHER; note = 2'-O-methyl modified nucleotide
tgaatttctactgttgtagattttctcaatgggaatgaaata

SEQ ID NO: 511 - RNA, 42 nt, synthetic construct
  source 1..42: mol_type = other RNA
  modified_base 1: mod_base = OTHER; note = 2'-O-methyl modified nucleotide with phosphorothioate linkage
  modified_base 2: mod_base = OTHER; note = 2'-O-methyl modified nucleotide with phosphorothioate linkage
  modified_base 3: mod_base = OTHER; note = 2'-O-methyl modified nucleotide
  modified_base 40: mod_base = OTHER; note = 2'-O-methyl modified nucleotide
  modified_base 41: mod_base = OTHER; note = 2'-O-methyl modified nucleotide with phosphorothioate linkage
  modified_base 42: mod_base = OTHER; note = 2'-O-methyl modified nucleotide
tgaatttctactgttgtagatctcaatgggaatgaaataatt

SEQ ID NO: 512 - RNA, 42 nt, synthetic construct
  source 1..42: mol_type = other RNA
  modified_base 1: mod_base = OTHER; note = 2'-O-methyl modified nucleotide with phosphorothioate linkage
  modified_base 2: mod_base = OTHER; note = 2'-O-methyl modified nucleotide with phosphorothioate linkage
  modified_base 3: mod_base = OTHER; note = 2'-O-methyl modified nucleotide
  modified_base 40: mod_base = OTHER; note = 2'-O-methyl modified nucleotide
  modified_base 41: mod_base = OTHER; note = 2'-O-methyl modified nucleotide with phosphorothioate linkage
  modified_base 42: mod_base = OTHER; note = 2'-O-methyl modified nucleotide
tgaatttctactgttgtagattcaatgggaatgaaataattt

SEQ ID NO: 513 - RNA, 42 nt, synthetic construct
  source 1..42: mol_type = other RNA
  modified_base 1: mod_base = OTHER; note = 2'-O-methyl modified nucleotide with phosphorothioate linkage
  modified_base 2: mod_base = OTHER; note = 2'-O-methyl modified nucleotide with phosphorothioate linkage
  modified_base 3: mod_base = OTHER; note = 2'-O-methyl modified nucleotide
  modified_base 40: mod_base = OTHER; note = 2'-O-methyl modified nucleotide
  modified_base 41: mod_base = OTHER; note = 2'-O-methyl modified nucleotide with phosphorothioate linkage
  modified_base 42: mod_base = OTHER; note = 2'-O-methyl modified nucleotide
tgaatttctactgttgtagatggagtccacacggcatggcat

SEQ ID NO: 514 - RNA, 42 nt, synthetic construct
  source 1..42: mol_type = other RNA
  modified_base 1: mod_base = OTHER; note = 2'-O-methyl modified nucleotide with phosphorothioate linkage
  modified_base 2: mod_base = OTHER; note = 2'-O-methyl modified nucleotide with phosphorothioate linkage
  modified_base 3: mod_base = OTHER; note = 2'-O-methyl modified nucleotide
  modified_base 40: mod_base = OTHER; note = 2'-O-methyl modified nucleotide
  modified_base 41: mod_base = OTHER; note = 2'-O-methyl modified nucleotide with phosphorothioate linkage
  modified_base 42: mod_base = OTHER; note = 2'-O-methyl modified nucleotide
tgaatttctactgttgtagatgggagtccacacggcatggca

SEQ ID NO: 515 - RNA, 42 nt, synthetic construct
  source 1..42: mol_type = other RNA
  modified_base 1: mod_base = OTHER; note = 2'-O-methyl modified nucleotide with phosphorothioate linkage
  modified_base 2: mod_base = OTHER; note = 2'-O-methyl modified nucleotide with phosphorothioate linkage
  modified_base 3: mod_base = OTHER; note = 2'-O-methyl modified nucleotide
  modified_base 40: mod_base = OTHER; note = 2'-O-methyl modified nucleotide
  modified_base 41: mod_base = OTHER; note = 2'-O-methyl modified nucleotide with phosphorothioate linkage
  modified_base 42: mod_base = OTHER; note = 2'-O-methyl modified nucleotide
tgaatttctactgttgtagattgggagtccacacggcatggc

SEQ ID NO: 516 - RNA, 42 nt, synthetic construct
  source 1..42: mol_type = other RNA
  modified_base 1: mod_base = OTHER; note = 2'-O-methyl modified nucleotide with phosphorothioate linkage
  modified_base 2: mod_base = OTHER; note = 2'-O-methyl modified nucleotide with phosphorothioate linkage
  modified_base 3: mod_base = OTHER; note = 2'-O-methyl modified nucleotide
  modified_base 40: mod_base = OTHER; note = 2'-O-methyl modified nucleotide
  modified_base 41: mod_base = OTHER; note = 2'-O-methyl modified nucleotide with phosphorothioate linkage
  modified_base 42: mod_base = OTHER; note = 2'-O-methyl modified nucleotide
tgaatttctactgttgtagatcaattttgggagtccacacgg

SEQ ID NO: 517 - RNA, 42 nt, synthetic construct
  source 1..42: mol_type = other RNA
  modified_base 1: mod_base = OTHER; note = 2'-O-methyl modified nucleotide with phosphorothioate linkage
  modified_base 2: mod_base = OTHER; note = 2'-O-methyl modified nucleotide with phosphorothioate linkage
  modified_base 3: mod_base = OTHER; note = 2'-O-methyl modified nucleotide
  modified_base 40: mod_base = OTHER; note = 2'-O-methyl modified nucleotide
  modified_base 41: mod_base = OTHER; note = 2'-O-methyl modified nucleotide with phosphorothioate linkage
  modified_base 42: mod_base = OTHER; note = 2'-O-methyl modified nucleotide
tgaatttctactgttgtagatacaattttgggagtccacacg

SEQ ID NO: 518 - RNA, 42 nt, synthetic construct
  source 1..42: mol_type = other RNA
  modified_base 1: mod_base = OTHER; note = 2'-O-methyl modified nucleotide with phosphorothioate linkage
  modified_base 2: mod_base = OTHER; note = 2'-O-methyl modified nucleotide with phosphorothioate linkage
  modified_base 3: mod_base = OTHER; note = 2'-O-methyl modified nucleotide
  modified_base 40: mod_base = OTHER; note = 2'-O-methyl modified nucleotide
  modified_base 41: mod_base = OTHER; note = 2'-O-methyl modified nucleotide with phosphorothioate linkage
  modified_base 42: mod_base = OTHER; note = 2'-O-methyl modified nucleotide
tgaatttctactgttgtagatgtatgccatgccgtgtggact

SEQ ID NO: 519 - RNA, 42 nt, synthetic construct
  source 1..42: mol_type = other RNA
  modified_base 1: mod_base = OTHER; note = 2'-O-methyl modified nucleotide with phosphorothioate linkage
  modified_base 2: mod_base = OTHER; note = 2'-O-methyl modified nucleotide with phosphorothioate linkage
  modified_base 3: mod_base = OTHER; note = 2'-O-methyl modified nucleotide
  modified_base 40: mod_base = OTHER; note = 2'-O-methyl modified nucleotide
  modified_base 41: mod_base = OTHER; note = 2'-O-methyl modified nucleotide with phosphorothioate linkage
  modified_base 42: mod_base = OTHER; note = 2'-O-methyl modified nucleotide
tgaatttctactgttgtagattatgccatgccgtgtggactc

SEQ ID NO: 520 - RNA, 42 nt, synthetic construct
  source 1..42: mol_type = other RNA
  modified_base 1: mod_base = OTHER; note = 2'-O-methyl modified nucleotide with phosphorothioate linkage
  modified_base 2: mod_base = OTHER; note = 2'-O-methyl modified nucleotide with phosphorothioate linkage
  modified_base 3: mod_base = OTHER; note = 2'-O-methyl modified nucleotide
  modified_base 40: mod_base = OTHER; note = 2'-O-methyl modified nucleotide
  modified_base 41: mod_base = OTHER; note = 2'-O-methyl modified nucleotide with phosphorothioate linkage
  modified_base 42: mod_base = OTHER; note = 2'-O-methyl modified nucleotide
tgaatttctactgttgtagatacctcctttacaattttggga

SEQ ID NO: 521 - RNA, 42 nt, synthetic construct
  source 1..42: mol_type = other RNA
  modified_base 1: mod_base = OTHER; note = 2'-O-methyl modified nucleotide with phosphorothioate linkage
  modified_base 2: mod_base = OTHER; note = 2'-O-methyl modified nucleotide with phosphorothioate linkage
  modified_base 3: mod_base = OTHER; note = 2'-O-methyl modified nucleotide
  modified_base 40: mod_base = OTHER; note = 2'-O-methyl modified nucleotide
  modified_base 41: mod_base = OTHER; note = 2'-O-methyl modified nucleotide with phosphorothioate linkage
  modified_base 42: mod_base = OTHER; note = 2'-O-methyl modified nucleotide
tgaatttctactgttgtagattaaaggaggtgaagcttcccc

SEQ ID NO: 522 - RNA, 44 nt, synthetic construct
  source 1..44: mol_type = other RNA
  modified_base 43: mod_base = OTHER; note = 2'-O-methyl modified nucleotide
  modified_base 44: mod_base = OTHER; note = 2'-O-methyl modified nucleotide
tgaatttctactgttgtagatccttgtcaaggctattggtcass

SEQ ID NO: 523 - RNA, 46 nt, synthetic construct
  source 1..46: mol_type = other RNA
tgaatttctactgttgtagatccttgtcaaggctattggtcatttt

SEQ ID NO: 524 - RNA, 47 nt, synthetic construct
  source 1..47: mol_type = other RNA
tgaatttctactgttgtagatccttgtcaaggctattggtcattttt

SEQ ID NO: 525 - RNA, 48 nt, synthetic construct
  source 1..48: mol_type = other RNA
tgaatttctactgttgtagatccttgtcaaggctattggtcatttttt

SEQ ID NO: 526 - RNA, 49 nt, synthetic construct
  source 1..49: mol_type = other RNA
tgaatttctactgttgtagatccttgtcaaggctattggtcattttttt

SEQ ID NO: 527 - RNA, 50 nt, synthetic construct
  source 1..50: mol_type = other RNA
tgaatttctactgttgtagatccttgtcaaggctattggtcatttttttt

SEQ ID NO: 528 - RNA, 51 nt, synthetic construct
  source 1..51: mol_type = other RNA
tgaatttctactgttgtagatccttgtcaaggctattggtcattttttttt

SEQ ID NO: 529 - RNA, 25 nt, synthetic construct
  source 1..25: mol_type = other RNA
  modified_base 25: mod_base = OTHER; note = 2'-O-methyl modified nucleotide
tgaatgaaggctattggtcatttts

SEQ ID NO: 530 - RNA, 26 nt, synthetic construct
  source 1..26: mol_type = other RNA
  modified_base 26: mod_base = OTHER; note = 2'-O-methyl modified nucleotide
tgaatgaaggctattggtcattttts

SEQ ID NO: 531 - RNA, 27 nt, synthetic construct
  source 1..27: mol_type = other RNA
  modified_base 27: mod_base = OTHER; note = 2'-O-methyl modified nucleotide
tgaatgaaggctattggtcatttttts

SEQ ID NO: 532 - RNA, 28 nt, synthetic construct
  source 1..28: mol_type = other RNA
  modified_base 28: mod_base = OTHER; note = 2'-O-methyl modified nucleotide
tgaatgaaggctattggtcattttttts

SEQ ID NO: 533 - RNA, 29 nt, synthetic construct
  source 1..29: mol_type = other RNA
  modified_base 29: mod_base = OTHER; note = 2'-O-methyl modified nucleotide
tgaatgaaggctattggtcatttttttts

SEQ ID NO: 534 - RNA, 30 nt, synthetic construct
  source 1..30: mol_type = other RNA
  modified_base 30: mod_base = OTHER; note = 2'-O-methyl modified nucleotide
tgaatgaaggctattggtcattttttttts

SEQ ID NO: 535 - RNA, 42 nt, synthetic construct
  source 1..42: mol_type = other RNA
  modified_base 1: mod_base = OTHER; note = 2'-O-methyl modified nucleotide with phosphorothioate linkage
  modified_base 2: mod_base = OTHER; note = 2'-O-methyl modified nucleotide with phosphorothioate linkage
  modified_base 3: mod_base = OTHER; note = 2'-O-methyl modified nucleotide
  modified_base 40: mod_base = OTHER; note = 2'-O-methyl modified nucleotide
  modified_base 41: mod_base = OTHER; note = 2'-O-methyl modified nucleotide with phosphorothioate linkage
  modified_base 42: mod_base = OTHER; note = 2'-O-methyl modified nucleotide
tgaatttctactgttgtagatctggtaccaggatgatgcaat

SEQ ID NO: 536 - RNA, 42 nt, synthetic construct
  source 1..42: mol_type = other RNA
  modified_base 1: mod_base = OTHER; note = 2'-O-methyl modified nucleotide with phosphorothioate linkage
  modified_base 2: mod_base = OTHER; note = 2'-O-methyl modified nucleotide with phosphorothioate linkage
  modified_base 3: mod_base = OTHER; note = 2'-O-methyl modified nucleotide
  modified_base 40: mod_base = OTHER; note = 2'-O-methyl modified nucleotide
  modified_base 41: mod_base = OTHER; note = 2'-O-methyl modified nucleotide with phosphorothioate linkage
  modified_base 42: mod_base = OTHER; note = 2'-O-methyl modified nucleotide
tgaatttctactgttgtagatcatcatcctggtaccaggaag

SEQ ID NO: 537 - RNA, 42 nt, synthetic construct
  source 1..42: mol_type = other RNA
  modified_base 1: mod_base = OTHER; note = 2'-O-methyl modified nucleotide with phosphorothioate linkage
  modified_base 2: mod_base = OTHER; note = 2'-O-methyl modified nucleotide with phosphorothioate linkage
  modified_base 3: mod_base = OTHER; note = 2'-O-methyl modified nucleotide
  modified_base 40: mod_base = OTHER; note = 2'-O-methyl modified nucleotide
  modified_base 41: mod_base = OTHER; note = 2'-O-methyl modified nucleotide with phosphorothioate linkage
  modified_base 42: mod_base = OTHER; note = 2'-O-methyl modified nucleotide
tgaatttctactgttgtagatccttcctggtaccaggatgat

SEQ ID NO: 538 - DNA, 20 bp, synthetic construct
  source 1..20: mol_type = other DNA
gataaacaatcgtcatcctc

SEQ ID NO: 539 - DNA, 20 bp, synthetic construct
  source 1..20: mol_type = other DNA
ggataccaacccgcggggtc

SEQ ID NO: 540 - DNA, 20 bp, synthetic construct
  source 1..20: mol_type = other DNA
tgtttatcaacgtcatctag

SEQ ID NO: 541 - DNA, 20 bp, synthetic construct
  source 1..20: mol_type = other DNA
atctacttagaaagcgaaca

SEQ ID NO: 542 - DNA, 20 bp, synthetic construct
  source 1..20: mol_type = other DNA
ttgcttttatcacaggctcc

SEQ ID NO: 543 - DNA, 20 bp, synthetic construct
  source 1..20: mol_type = other DNA
ctaacagttgcttttatcac

SEQ ID NO: 544 - DNA, 20 bp, synthetic construct
  source 1..20: mol_type = other DNA
gtctcggtggtggactaaac

SEQ ID NO: 545 - DNA, 20 bp, synthetic construct
  source 1..20: mol_type = other DNA
ctgaagggataccaacccgc

SEQ ID NO: 546 - DNA, 20 bp, synthetic construct
  source 1..20: mol_type = other DNA
tgaaccagaccacggcccgt

SEQ ID NO: 547 - DNA, 20 bp, synthetic construct
  source 1..20: mol_type = other DNA
atcacccgagtgcctttgac

SEQ ID NO: 548 - DNA, 20 bp, synthetic construct
  source 1..20: mol_type = other DNA
ctggagcctgtgataaaagc

SEQ ID NO: 549 - DNA, 20 bp, synthetic construct
  source 1..20: mol_type = other DNA
ccttgtcaaggctattggtc

SEQ ID NO: 550 - DNA, 20 bp, synthetic construct
  source 1..20: mol_type = other DNA
cattgagatagtgtggggaa

SEQ ID NO: 551 - DNA, 20 bp, synthetic construct
  source 1..20: mol_type = other DNA
cttgtcaaggctattggtca

SEQ ID NO: 552 - DNA, 20 bp, synthetic construct
  source 1..20: mol_type = other DNA
attgagatagtgtggggaag

SEQ ID NO: 553 - DNA, 20 bp, synthetic construct
  source 1..20: mol_type = other DNA
cttgaccaatagccttgaca

SEQ ID NO: 554 - DNA, 20 bp, synthetic construct
  source 1..20: mol_type = other DNA
gtggggaaggggcccccaag

SEQ ID NO: 555 - DNA, 20 bp, synthetic construct
  source 1..20: mol_type = other DNA
caaggctattggtcaaggca

SEQ ID NO: 556 - DNA, 19 bp, synthetic construct
  source 1..19: mol_type = other DNA
cttgtcaaggctattggtc

SEQ ID NO: 557 - DNA, 20 bp, synthetic construct
  source 1..20: mol_type = other DNA
tagccttgacaaggcaaact

SEQ ID NO: 558 - DNA, 20 bp, synthetic construct
  source 1..20: mol_type = other DNA
tatctgtctgaaacggtccc

SEQ ID NO: 559 - DNA, 19 bp, synthetic construct
  source 1..19: mol_type = other DNA
gtggggaaggggcccccaa

SEQ ID NO: 560 - DNA, 20 bp, synthetic construct
  source 1..20: mol_type = other DNA
agatatttgcattgagatag

SEQ ID NO: 561 - DNA, 20 bp, synthetic construct
  source 1..20: mol_type = other DNA
ggcaaggctggccaacccat

SEQ ID NO: 562 - DNA, 20 bp, synthetic construct
  source 1..20: mol_type = other DNA
aggcaaggctggccaaccca

SEQ ID NO: 563 - DNA, 21 bp, synthetic construct
  source 1..21: mol_type = other DNA
ccttgtcaaggctattggtca

SEQ ID NO: 564 - DNA, 22 bp, synthetic construct
  source 1..22: mol_type = other DNA
ccttgtcaaggctattggtcaa

SEQ ID NO: 565 - DNA, 23 bp, synthetic construct
  source 1..23: mol_type = other DNA
ccttgtcaaggctattggtcaag

SEQ ID NO: 566 - DNA, 23 bp, synthetic construct
  source 1..23: mol_type = other DNA
cattgagatagtgtggggaaggg

SEQ ID NO: 567 - DNA, 20 bp, synthetic construct
  source 1..20: mol_type = other DNA
cccaggggggcctctttcgg

SEQ ID NO: 568 - DNA, 20 bp, synthetic construct
  source 1..20: mol_type = other DNA
tcacaggctccaggaagggt

SEQ ID NO: 569 - DNA, 20 bp, synthetic construct
  source 1..20: mol_type = other DNA
aagctagtctagtgcaagct

SEQ ID NO: 570 - DNA, 20 bp, synthetic construct
  source 1..20: mol_type = other DNA
cactggaatcagctatctgc

SEQ ID NO: 571 - DNA, 20 bp, synthetic construct
  source 1..20: mol_type = other DNA
agccatctcactacagataa

SEQ ID NO: 572 - DNA, 20 bp, synthetic construct
  source 1..20: mol_type = other DNA
cccatggggcacagtcaggc

SEQ ID NO: 573 - DNA, 20 bp, synthetic construct
  source 1..20: mol_type = other DNA
ttttatcacaggctccagga

SEQ ID NO: 574 - DNA, 20 bp, synthetic construct
  source 1..20: mol_type = other DNA
tttatcacaggctccaggaa

SEQ ID NO: 575 - DNA, 20 bp, synthetic construct
  source 1..20: mol_type = other DNA
actgaatcggaacaaggcaa

SEQ ID NO: 576 - DNA, 20 bp, synthetic construct
  source 1..20: mol_type = other DNA
ctaacagttgcttttatcac

SEQ ID NO: 577 - DNA, 21 bp, synthetic construct
  source 1..21: mol_type = other DNA
atcacaggctccaggaagggt

SEQ ID NO: 578 - DNA, 21 bp, synthetic construct
  source 1..21: mol_type = other DNA
tcacaggctccaggaagggtt

SEQ ID NO: 579 - DNA, 21 bp, synthetic construct
  source 1..21: mol_type = other DNA
gcctctgattagggtgggggc

SEQ ID NO: 580 - DNA, 21 bp, synthetic construct
  source 1..21: mol_type = other DNA
cattgagatagtgtggggaag

SEQ ID NO: 581 - DNA, 21 bp, synthetic construct
  source 1..21: mol_type = other DNA
agacagatatttgcattgaga

SEQ ID NO: 582 - DNA, 21 bp, synthetic construct
  source 1..21: mol_type = other DNA
gccagggaccgtttcagacag

SEQ ID NO: 583 - DNA, 21 bp, synthetic construct
  source 1..21: mol_type = other DNA
cggctggctagggatgaagaa

SEQ ID NO: 584 - DNA, 19 bp, synthetic construct
  source 1..19: mol_type = other DNA
  modified_base 1: mod_base = OTHER; note = 2'-O-methyl modified nucleotide
  modified_base 2: mod_base = OTHER; note = 2'-O-methyl modified nucleotide
  modified_base 3: mod_base = OTHER; note = 2'-O-methyl modified thymine
  modified_base 4: mod_base = OTHER; note = 2'-O-methyl modified thymine
  modified_base 5: mod_base = OTHER; note = 2'-O-methyl modified nucleotide
  modified_base 6: mod_base = OTHER; note = 2'-O-methyl modified thymine
  modified_base 7: mod_base = OTHER; note = 2'-O-methyl modified nucleotide
  modified_base 8: mod_base = OTHER; note = 2'-O-methyl modified nucleotide
  modified_base 9: mod_base = OTHER; note = 2'-O-methyl modified nucleotide
  modified_base 10: mod_base = OTHER; note = 2'-O-methyl modified nucleotide
  modified_base 11: mod_base = OTHER; note = 2'-O-methyl modified nucleotide
  modified_base 12: mod_base = OTHER; note = 2'-O-methyl modified nucleotide
  modified_base 13: mod_base = OTHER; note = 2'-O-methyl modified thymine
  modified_base 14: mod_base = OTHER; note = 2'-O-methyl modified nucleotide
  modified_base 15: mod_base = OTHER; note = 2'-O-methyl modified thymine
  modified_base 16: mod_base = OTHER; note = 2'-O-methyl modified thymine
  modified_base 17: mod_base = OTHER; note = 2'-O-methyl modified nucleotide
  modified_base 18: mod_base = OTHER; note = 2'-O-methyl modified nucleotide
  modified_base 19: mod_base = OTHER; note = 2'-O-methyl modified thymine
ccttgtcaaggctattggt

SEQ ID NO: 585 - RNA, 21 nt, synthetic construct
  source 1..21: mol_type = other RNA
ccttgtcaaggctattggtca

SEQ ID NO: 586 - RNA, 22 nt, synthetic construct
  source 1..22: mol_type = other RNA
tccttgtcaaggctattggtca

SEQ ID NO: 587 - DNA, 21 bp, synthetic construct
  source 1..21: mol_type = other DNA
ttccgattcagtcattccagt

SEQ ID NO: 588 - DNA, 21 bp, synthetic construct
  source 1..21: mol_type = other DNA
ccttgttccgattcagtcatt

SEQ ID NO: 589 - DNA, 21 bp, synthetic construct
  source 1..21: mol_type = other DNA
gccttgttccgattcagtcat

SEQ ID NO: 590 - DNA, 21 bp, synthetic construct
  source 1..21: mol_type = other DNA
tagcctttgccttgttccgat

SEQ ID NO: 591 - DNA, 21 bp, synthetic construct
  source 1..21: mol_type = other DNA
atagcctttgccttgttccga

SEQ ID NO: 592 - DNA, 21 bp, synthetic construct
  source 1..21: mol_type = other DNA
tatagcctttgccttgttccg

SEQ ID NO: 593 - DNA, 21 bp, synthetic construct
  source 1..21: mol_type = other DNA
ttatagcctttgccttgttcc

SEQ ID NO: 594 - DNA, 21 bp, synthetic construct
  source 1..21: mol_type = other DNA
tttatagcctttgccttgttc

SEQ ID NO: 595 - DNA, 21 bp, synthetic construct
  source 1..21: mol_type = other DNA
ttttatagcctttgccttgtt

SEQ ID NO: 596 - DNA, 21 bp, synthetic construct
  source 1..21: mol_type = other DNA
tttttatagcctttgccttgt

SEQ ID NO: 597 - DNA, 21 bp, synthetic construct
  source 1..21: mol_type = other DNA
agatagtgtggggaaggggcc

SEQ ID NO: 598 - DNA, 21 bp, synthetic construct
  source 1..21: mol_type = other DNA
gcagtatcctcttgggggccc

SEQ ID NO: 599 - DNA, 21 bp, synthetic construct
  source 1..21: mol_type = other DNA
gcattgagatagtgtggggaa

SEQ ID NO: 600 - DNA, 21 bp, synthetic construct
  source 1..21: mol_type = other DNA
ggggccccttccccacactat

SEQ ID NO: 601 - DNA, 21 bp, synthetic construct
  source 1..21: mol_type = other DNA
cagacagatatttgcattgag

SEQ ID NO: 602 - DNA, 21 bp, synthetic construct
  source 1..21: mol_type = other DNA
cccacactatctcaatgcaaa

SEQ ID NO: 603 - DNA, 21 bp, synthetic construct
  source 1..21: mol_type = other DNA
agccagggaccgtttcagaca

SEQ ID NO: 604 - DNA, 21 bp, synthetic construct
  source 1..21: mol_type = other DNA
gtcaaggcaaggctggccaac

SEQ ID NO: 605 - DNA, 21 bp, synthetic construct
  source 1..21: mol_type = other DNA
tcaaggctattggtcaaggca

SEQ ID NO: 606 - DNA, 21 bp, synthetic construct
  source 1..21: mol_type = other DNA
gccttgtcaaggctattggtc

SEQ ID NO: 607 - DNA, 21 bp, synthetic construct
  source 1..21: mol_type = other DNA
gccagccttgccttgaccaat

SEQ ID NO: 608 - DNA, 21 bp, synthetic construct
  source 1..21: mol_type = other DNA
gtcaagtttgccttgtcaagg

SEQ ID NO: 609 - DNA, 21 bp, synthetic construct
  source 1..21: mol_type = other DNA
ccttgaccaatagccttgaca

SEQ ID NO: 610 - DNA, 21 bp, synthetic construct
  source 1..21: mol_type = other DNA
accaatagccttgacaaggca

SEQ ID NO: 611 - DNA, 21 bp, synthetic construct
  source 1..21: mol_type = other DNA
acaaggcaaacttgaccaata

SEQ ID NO: 612 - DNA, 21 bp, synthetic construct
  source 1..21: mol_type = other DNA
accaatagtcttagagtatcc

SEQ ID NO: 613 - DNA, 21 bp, synthetic construct
  source 1..21: mol_type = other DNA
gagtatccagtgaggccaggg

SEQ ID NO: 614 - DNA, 21 bp, synthetic construct
  source 1..21: mol_type = other DNA
atccctagccagccgccggcc

SEQ ID NO: 615 - DNA, 21 bp, synthetic construct
  source 1..21: mol_type = other DNA
ttcatccctagccagccgccg

SEQ ID NO: 616 - DNA, 21 bp, synthetic construct
  source 1..21: mol_type = other DNA
ttcttcatccctagccagccg

SEQ ID NO: 617 - DNA, 21 bp, synthetic construct
  source 1..21: mol_type = other DNA
attcttcatccctagccagcc

SEQ ID NO: 618 - DNA, 21 bp, synthetic construct
  source 1..21: mol_type = other DNA
tattcttcatccctagccagc

SEQ ID NO: 619 - DNA, 21 bp, synthetic construct
  source 1..21: mol_type = other DNA
cttttattcttcatccctagc

SEQ ID NO: 620 - DNA, 21 bp, synthetic construct
  source 1..21: mol_type = other DNA
cagaagcgagtgtgtggaact

SEQ ID NO: 621 - DNA, 21 bp, synthetic construct
  source 1..21: mol_type = other DNA
agcagttccacacactcgctt

SEQ ID NO: 622 - DNA, 21 bp, synthetic construct
  source 1..21: mol_type = other DNA
ataacctcagacgttccagaa

SEQ ID NO: 623 - DNA, 21 bp, synthetic construct
  source 1..21: mol_type = other DNA
ttgataacctcagacgttcca

SEQ ID NO: 624 - DNA, 21 bp, synthetic construct
  source 1..21: mol_type = other DNA
cacacactcgcttctggaacg

SEQ ID NO: 625 - DNA, 21 bp, synthetic construct
  source 1..21: mol_type = other DNA
tggaacgtctgaggttatcaa

SEQ ID NO: 626 - DNA, 21 bp, synthetic construct
  source 1..21: mol_type = other DNA
tcaataagctcctagtccaga

SEQ ID NO: 627 - DNA, 21 bp, synthetic construct
  source 1..21: mol_type = other DNA
cactggaatcagctatctgct

SEQ ID NO: 628 - DNA, 21 bp, synthetic construct
  source 1..21: mol_type = other DNA
gcactggaatcagctatctgc

SEQ ID NO: 629 - DNA, 21 bp, synthetic construct
  source 1..21: mol_type = other DNA
cctgtatggactttgcactgg

SEQ ID NO: 630 - DNA, 21 bp, synthetic construct
  source 1..21: mol_type = other DNA
ttacctgtatggactttgcac

SEQ ID NO: 631 - DNA, 21 bp, synthetic construct
  source 1..21: mol_type = other DNA
tggcctatgttattacctgta

SEQ ID NO: 632 - DNA, 21 bp, synthetic construct
  source 1..21: mol_type = other DNA
ctggcctatgttattacctgt

SEQ ID NO: 633 - DNA, 21 bp, synthetic construct
  source 1..21: mol_type = other DNA
tctggcctatgttattacctg

SEQ ID NO: 634 - DNA, 21 bp, synthetic construct
  source 1..21: mol_type = other DNA
cagtgcaaagtccatacaggt

SEQ ID NO: 635 - DNA, 21 bp, synthetic construct
  source 1..21: mol_type = other DNA
tgtctaagagtagatgccata

SEQ ID NO: 636 - DNA, 21 bp, synthetic construct
  source 1..21: mol_type = other DNA
accctggtgtgttatgtctaa

SEQ ID NO: 637 - DNA, 21 bp, synthetic construct
  source 1..21: mol_type = other DNA
tattgaccctggtgtgttatg

SEQ ID NO: 638 - DNA, 21 bp, synthetic construct
  source 1..21: mol_type = other DNA
aaagttgtattgaccctggtg

SEQ ID NO: 639 - DNA, 21 bp, synthetic construct
  source 1..21: mol_type = other DNA
gacataacacaccagggtcaa

SEQ ID NO: 640 - DNA, 21 bp, synthetic construct
  source 1..21: mol_type = other DNA
cactagactagcttcaaagtt

SEQ ID NO: 641 - DNA, 21 bp, synthetic construct
  source 1..21: mol_type = other DNA
gcttgcactagactagcttca

SEQ ID NO: 642 - DNA, 21 bp, synthetic construct
  source 1..21: mol_type = other DNA
gaagctagtctagtgcaagct

SEQ ID NO: 643 - DNA, 21 bp, synthetic construct
  source 1..21: mol_type = other DNA
aagctagtctagtgcaagcta

SEQ ID NO: 644 - DNA, 21 bp, synthetic construct
  source 1..21: mol_type = other DNA
ctggagcctgtgataaaagca

SEQ ID NO: 645 - DNA, 21 bp, synthetic construct
  source 1..21: mol_type = other DNA
cttttatcacaggctccagga

SEQ ID NO: 646 - DNA, 21 bp, synthetic construct
  source 1..21: mol_type = other DNA
tatcacaggctccaggaaggg

SEQ ID NO: 647 - DNA, 21 bp, synthetic construct
  source 1..21: mol_type = other DNA
taccccacccacgcccccacc

SEQ ID NO: 648 - DNA, 21 bp, synthetic construct
  source 1..21: mol_type = other DNA
ggcctctgattagggtggggg

SEQ ID NO: 649 - DNA, 21 bp, synthetic construct
  source 1..21: mol_type = other DNA
gggtgggggcgtgggtggggt

SEQ ID NO: 650 - DNA, 21 bp, synthetic construct
  source 1..21: mol_type = other DNA
cgaaagaggcccccctgggca

SEQ ID NO: 651 - DNA, 21 bp, synthetic construct
  source 1..21: mol_type = other DNA
gcccaggggggcctctttcgg

SEQ ID NO: 652 - DNA, 21 bp, synthetic construct
  source 1..21: mol_type = other DNA
cccaggggggcctctttcgga

SEQ ID NO: 653 - DNA, 21 bp, synthetic construct
  source 1..21: mol_type = other DNA
tccatcaccaagagagccttc

SEQ ID NO: 654 - DNA, 21 bp, synthetic construct
  source 1..21: mol_type = other DNA
cggaaggctctcttggtgatg

SEQ ID NO: 655 - DNA, 21 bp, synthetic construct
  source 1..21: mol_type = other DNA
ggaaggctctcttggtgatgg

SEQ ID NO: 656 - DNA, 21 bp, synthetic construct
  source 1..21: mol_type = other DNA
agaaataaaatccaattctcc

SEQ ID NO: 657 - DNA, 21 bp, synthetic construct
  source 1..21: mol_type = other DNA
ccattgagaaataaaatccaa

SEQ ID NO: 658 - DNA, 21 bp, synthetic construct
  source 1..21: mol_type = other DNA
attcccattgagaaataaaat

SEQ ID NO: 659 - DNA, 21 bp, synthetic construct
  source 1..21: mol_type = other DNA
cattcccattgagaaataaaa

SEQ ID NO: 660 - DNA, 21 bp, synthetic construct
  source 1..21: mol_type = other DNA
gtgatggagaattggatttta

SEQ ID NO: 661 - DNA, 21 bp, synthetic construct
  source 1..21: mol_type = other DNA
tttcattcccattgagaaata

SEQ ID NO: 662 - DNA, 21 bp, synthetic construct
  source 1..21: mol_type = other DNA
gattttatttctcaatgggaa

SEQ ID NO: 663 - DNA, 21 bp, synthetic construct
  source 1..21: mol_type = other DNA
tatttctcaatgggaatgaaa

SEQ ID NO: 664 - DNA, 21 bp, synthetic construct
  source 1..21: mol_type = other DNA
atttctcaatgggaatgaaat

SEQ ID NO: 665 - DNA, 21 bp, synthetic construct
  source 1..21: mol_type = other DNA
tttctcaatgggaatgaaata

SEQ ID NO: 666 - DNA, 21 bp, synthetic construct
  source 1..21: mol_type = other DNA
ctcaatgggaatgaaataatt

SEQ ID NO: 667 - DNA, 21 bp, synthetic construct
  source 1..21: mol_type = other DNA
tcaatgggaatgaaataattt

SEQ ID NO: 668 - DNA, 21 bp, synthetic construct
  source 1..21: mol_type = other DNA
ggagtccacacggcatggcat

SEQ ID NO: 669 - DNA, 21 bp, synthetic construct
  source 1..21: mol_type = other DNA
gggagtccacacggcatggca

SEQ ID NO: 670 - DNA, 21 bp, synthetic construct
  source 1..21: mol_type = other DNA
tgggagtccacacggcatggc

SEQ ID NO: 671 - DNA, 21 bp, synthetic construct
  source 1..21: mol_type = other DNA
caattttgggagtccacacgg

SEQ ID NO: 672 - DNA, 21 bp, synthetic construct
  source 1..21: mol_type = other DNA
acaattttgggagtccacacg

SEQ ID NO: 673 - DNA, 21 bp, synthetic construct
  source 1..21: mol_type = other DNA
gtatgccatgccgtgtggact

SEQ ID NO: 674 - DNA, 21 bp, synthetic construct
  source 1..21: mol_type = other DNA
tatgccatgccgtgtggactc

SEQ ID NO: 675 - DNA, 21 bp, synthetic construct
  source 1..21: mol_type = other DNA
acctcctttacaattttggga

SEQ ID NO: 676 - DNA, 21 bp, synthetic construct
  source 1..21: mol_type = other DNA
taaaggaggtgaagcttcccc

SEQ ID NO: 677 - DNA, 21 bp, synthetic construct
  source 1..21: mol_type = other DNA
ctggtaccaggatgatgcaat

SEQ ID NO: 678 - DNA, 21 bp, synthetic construct
  source 1..21: mol_type = other DNA
catcatcctggtaccaggaag

SEQ ID NO: 679 - DNA, 21 bp, synthetic construct
  source 1..21: mol_type = other DNA
ccttcctggtaccaggatgat

SEQ ID NO: 680 - RNA, 42 nt, synthetic construct; identical to SEQ ID NO: 207
  source 1..42: mol_type = other RNA
  modified_base 1: mod_base = OTHER; note = 2'-O-methyl modified nucleotide with phosphorothioate linkage
  modified_base 2: mod_base = OTHER; note = 2'-O-methyl modified nucleotide with phosphorothioate linkage
  modified_base 6: mod_base = OTHER; note = 2'-O-methyl modified nucleotide
  modified_base 7: mod_base = OTHER; note = 2'-O-methyl modified nucleotide
  modified_base 10: mod_base = OTHER; note = 2'-O-methyl modified nucleotide
  modified_base 11: mod_base = OTHER; note = 2'-O-methyl modified nucleotide
  modified_base 13: mod_base = OTHER; note = 2'-O-methyl modified nucleotide
  modified_base 14: mod_base = OTHER; note = 2'-O-methyl modified nucleotide
  modified_base 15: mod_base = OTHER; note = 2'-O-methyl modified nucleotide
  modified_base 17: mod_base = OTHER; note = 2'-O-methyl modified nucleotide
  modified_base 18: mod_base = OTHER; note = 2'-O-methyl modified nucleotide
  modified_base 19: mod_base = OTHER; note = 2'-O-methyl modified nucleotide
  modified_base 20: mod_base = OTHER; note = 2'-O-methyl modified nucleotide
  modified_base 22: mod_base = OTHER; note = 2'-O-methyl modified nucleotide
  modified_base 29: mod_base = OTHER; note = 2'-O-methyl modified nucleotide
  modified_base 30: mod_base = OTHER; note = 2'-O-methyl modified nucleotide
  modified_base 31: mod_base = OTHER; note = 2'-O-methyl modified nucleotide
  modified_base 33: mod_base = OTHER; note = 2'-O-methyl modified nucleotide
  modified_base 40: mod_base = OTHER; note = Nucleotide with phosphorothioate linkage
  modified_base 41: mod_base = OTHER; note = 2'-O-methyl modified nucleotide with phosphorothioate linkage
  modified_base 42: mod_base = OTHER; note = 2'-O-methyl modified nucleotide

SEQ ID NO: 681 - RNA, 42 nt, synthetic construct; identical to SEQ ID NO: 207
  source 1..42: mol_type = other RNA
  modified_base 1: mod_base = OTHER; note = 2'-O-methyl modified nucleotide with phosphorothioate linkage
  modified_base 2: mod_base = OTHER; note = 2'-O-methyl modified nucleotide with phosphorothioate linkage
  modified_base 6: mod_base = OTHER; note = 2'-O-methyl modified nucleotide
  modified_base 7: mod_base = OTHER; note = 2'-O-methyl modified nucleotide
  modified_base 10: mod_base = OTHER; note = 2'-O-methyl modified nucleotide
  modified_base 11: mod_base = OTHER; note = 2'-O-methyl modified nucleotide
  modified_base 13: mod_base = OTHER; note = 2'-O-methyl modified nucleotide
  modified_base 14: mod_base = OTHER; note = 2'-O-methyl modified nucleotide
  modified_base 15: mod_base = OTHER; note = 2'-O-methyl modified nucleotide
  modified_base 17: mod_base = OTHER; note = 2'-O-methyl modified nucleotide
  modified_base 18: mod_base = OTHER; note = 2'-O-methyl modified nucleotide
  modified_base 21: mod_base = OTHER; note = 2'-O-methyl modified nucleotide
  modified_base 22: mod_base = OTHER; note = 2'-O-methyl modified nucleotide
  modified_base 29: mod_base = OTHER; note = 2'-O-methyl modified nucleotide
  modified_base 30: mod_base = OTHER; note = 2'-O-methyl modified nucleotide
  modified_base 31: mod_base = OTHER; note = 2'-O-methyl modified nucleotide
  modified_base 32: mod_base = OTHER; note = 2'-O-methyl modified nucleotide
  modified_base 33: mod_base = OTHER; note = 2'-O-methyl modified nucleotide
  modified_base 34: mod_base = OTHER; note = 2'-O-methyl modified nucleotide
  modified_base 40: mod_base = OTHER; note = Nucleotide with phosphorothioate linkage
  modified_base 41: mod_base = OTHER; note = 2'-O-methyl modified nucleotide with phosphorothioate linkage
  modified_base 42: mod_base = OTHER; note = 2'-O-methyl modified nucleotide

SEQ ID NO: 682 - RNA, 42 nt, synthetic construct; identical to SEQ ID NO: 207
  source 1..42: mol_type = other RNA
  modified_base 1: mod_base = OTHER; note = 2'-O-methyl modified nucleotide with phosphorothioate linkage
  modified_base 2: mod_base = OTHER; note = 2'-O-methyl modified nucleotide with phosphorothioate linkage
  modified_base 7: mod_base = OTHER; note = 2'-O-methyl modified nucleotide
  modified_base 10: mod_base = OTHER; note = 2'-O-methyl modified nucleotide
  modified_base 11: mod_base = OTHER; note = 2'-O-methyl modified nucleotide
  modified_base 13: mod_base = OTHER; note = 2'-O-methyl modified nucleotide
  modified_base 14: mod_base = OTHER; note = 2'-O-methyl modified nucleotide
  modified_base 15: mod_base = OTHER; note = 2'-O-methyl modified nucleotide
  modified_base 17: mod_base = OTHER; note = 2'-O-methyl modified nucleotide
  modified_base 18: mod_base = OTHER; note = 2'-O-methyl modified nucleotide
  modified_base 22: mod_base = OTHER; note = 2'-O-methyl modified nucleotide
  modified_base 29: mod_base = OTHER; note = 2'-O-methyl modified nucleotide
  modified_base 30: mod_base = OTHER; note = 2'-O-methyl modified nucleotide
  modified_base 31: mod_base = OTHER; note = 2'-O-methyl modified nucleotide
  modified_base 32: mod_base = OTHER; note = 2'-O-methyl modified nucleotide
  modified_base 40: mod_base = OTHER; note = Nucleotide with phosphorothioate linkage
  modified_base 41: mod_base = OTHER; note = 2'-O-methyl modified nucleotide with phosphorothioate linkage
  modified_base 42: mod_base = OTHER; note = 2'-O-methyl modified nucleotide

SEQ ID NO: 683 - RNA, 42 nt, synthetic construct; identical to SEQ ID NO: 207
  source 1..42: mol_type = other RNA
  modified_base 1: mod_base = OTHER; note = 2'-O-methyl modified nucleotide with phosphorothioate linkage
  modified_base 2: mod_base = OTHER; note = 2'-O-methyl modified nucleotide with phosphorothioate linkage
  modified_base 7: mod_base = OTHER; note = 2'-O-methyl modified nucleotide
  modified_base 10: mod_base = OTHER; note = 2'-O-methyl modified nucleotide
  modified_base 11: mod_base = OTHER; note = 2'-O-methyl modified nucleotide
  modified_base 13: mod_base = OTHER; note = 2'-O-methyl modified nucleotide
  modified_base 14: mod_base = OTHER; note = 2'-O-methyl modified nucleotide
  modified_base 15: mod_base = OTHER; note = 2'-O-methyl modified nucleotide
  modified_base 22: mod_base = OTHER; note = 2'-O-methyl modified nucleotide
  modified_base 29: mod_base = OTHER; note = 2'-O-methyl modified nucleotide
  modified_base 30: mod_base = OTHER; note = 2'-O-methyl modified nucleotide
  modified_base 31: mod_base = OTHER; note = 2'-O-methyl modified nucleotide
  modified_base 40: mod_base = OTHER; note = Nucleotide with phosphorothioate linkage
  modified_base 41: mod_base = OTHER; note = 2'-O-methyl modified nucleotide with phosphorothioate linkage
  modified_base 42: mod_base = OTHER; note = 2'-O-methyl modified nucleotide

SEQ ID NO: 684 - RNA, 42 nt, synthetic construct; identical to SEQ ID NO: 207
  source 1..42: mol_type = other RNA
  modified_base 1: mod_base = OTHER; note = 2'-O-methyl modified nucleotide with phosphorothioate linkage
  modified_base 2: mod_base = OTHER; note = 2'-O-methyl modified nucleotide with phosphorothioate linkage
  modified_base 6: mod_base = OTHER; note = 2'-O-methyl modified nucleotide
  modified_base 7: mod_base = OTHER; note = 2'-O-methyl modified nucleotide
  modified_base 10: mod_base = OTHER; note = 2'-O-methyl modified nucleotide
  modified_base 11: mod_base = OTHER; note = 2'-O-methyl modified nucleotide
  modified_base 13: mod_base = OTHER; note = 2'-O-methyl modified nucleotide
  modified_base 14: mod_base = OTHER; note = 2'-O-methyl modified nucleotide
  modified_base 15: mod_base = OTHER; note = 2'-O-methyl modified nucleotide
  modified_base 17: mod_base = OTHER; note = 2'-O-methyl modified nucleotide
  modified_base 18: mod_base = OTHER; note = 2'-O-methyl modified nucleotide
  modified_base 19: mod_base = OTHER; note = 2'-O-methyl modified nucleotide
  modified_base 20: mod_base = OTHER; note = 2'-O-methyl modified nucleotide
  modified_base 22: mod_base = OTHER; note = 2'-O-methyl modified nucleotide
  modified_base 29: mod_base = OTHER; note = 2'-O-methyl modified nucleotide
  modified_base 30: mod_base = OTHER; note = 2'-O-methyl modified nucleotide
  modified_base 31: mod_base = OTHER; note = 2'-O-methyl modified nucleotide
  modified_base 33: mod_base = OTHER; note = 2'-O-methyl modified nucleotide
  modified_base 40: mod_base = OTHER; note = 2'-O-methyl modified nucleotide with phosphorothioate linkage
  modified_base 41: mod_base = OTHER; note = 2'-O-methyl modified nucleotide with phosphorothioate linkage
  modified_base 42: mod_base = OTHER; note = 2'-O-methyl modified nucleotide

SEQ ID NO: 685 - RNA, 45 nt, synthetic construct
  source 1..45: mol_type = other RNA
tggatgaatttctactgttgtagatagtgggggtgaattcagtgt

SEQ ID NO: 686 - RNA, 50 nt, synthetic construct
  source 1..50: mol_type = other RNA
gggaatggatgaatttctactgttgtagatagtgggggtgaattcagtgt

SEQ ID NO: 687 - RNA, 56 nt, synthetic construct
  source 1..56: mol_type = other RNA
gtcaaagggaatggatgaatttctactgttgtagatagtgggggtgaattcagtgt

SEQ ID NO: 688 - RNA, 66 nt, synthetic construct
  source 1..66: mol_type = other RNA
atgtgtttttgtcaaaagacctttttgaatttctactgttgtagatagtgggggtgaattcagtgt

SEQ ID NO: 689 - RNA, 46 nt, synthetic construct; identical to SEQ ID NO: 321
  source 1..46: mol_type = other RNA

SEQ ID NO: 690 - RNA, 51 nt, synthetic construct; identical to SEQ ID NO: 322
  source 1..51: mol_type = other RNA

SEQ ID NO: 691 - RNA, 57 nt, synthetic construct; identical to SEQ ID NO: 323
  source 1..57: mol_type = other RNA

SEQ ID NO: 692 - RNA, 67 nt, synthetic construct; identical to SEQ ID NO: 324
  source 1..67: mol_type = other RNA

SEQ ID NO: 693 - DNA, 46 bp, synthetic construct; identical to SEQ ID NO: 356
  source 1..46: mol_type = other DNA
  modified_base 1: mod_base = OTHER; note = Nucleotide with phosphorothioate linkage
  modified_base 2: mod_base = OTHER; note = Nucleotide with phosphorothioate linkage
  modified_base 5: mod_base = OTHER; note = 2'-O-methyl modified nucleotide
  modified_base 6: mod_base = OTHER; note = 2'-O-methyl modified nucleotide
  modified_base 10: mod_base = OTHER; note = 2'-O-methyl modified nucleotide
  modified_base 11: mod_base = OTHER; note = 2'-O-methyl modified nucleotide
  modified_base 14: mod_base = OTHER; note = 2'-O-methyl modified nucleotide
  modified_base 15: mod_base = OTHER; note = 2'-O-methyl modified nucleotide
  modified_base 17: mod_base = OTHER; note = 2'-O-methyl modified nucleotide
  modified_base 18: mod_base = OTHER; note = 2'-O-methyl modified nucleotide
  modified_base 19: mod_base = OTHER; note = 2'-O-methyl modified nucleotide
  modified_base 21: mod_base = OTHER; note = 2'-O-methyl modified nucleotide
  modified_base 22: mod_base = OTHER; note = 2'-O-methyl modified nucleotide
  modified_base 23: mod_base = OTHER; note = 2'-O-methyl modified nucleotide
  modified_base 24: mod_base = OTHER; note = 2'-O-methyl modified nucleotide
  modified_base 26: mod_base = OTHER; note = 2'-O-methyl modified nucleotide
  modified_base 33: mod_base = OTHER; note = 2'-O-methyl modified nucleotide
  modified_base 34: mod_base = OTHER; note = 2'-O-methyl modified nucleotide
  modified_base 35: mod_base = OTHER; note = 2'-O-methyl modified nucleotide
  modified_base 37: mod_base = OTHER; note = 2'-O-methyl modified nucleotide
  modified_base 44: mod_base = OTHER; note = 2'-O-methyl modified nucleotide with phosphorothioate linkage
  modified_base 45: mod_base = OTHER; note = 2'-O-methyl modified nucleotide with phosphorothioate linkage
  modified_base 46: mod_base = OTHER; note = 2'-O-methyl modified nucleotide
  misc_feature 1..4: note = DNA
  misc_feature 5..46: note = RNA

SEQ ID NO: 694 - DNA, 51 bp, synthetic construct; identical to SEQ ID NO: 357
  source 1..51: mol_type = other DNA
  modified_base 1: mod_base = OTHER; note = Nucleotide with phosphorothioate linkage
  modified_base 2: mod_base = OTHER; note = Nucleotide with phosphorothioate linkage
  modified_base 10: mod_base = OTHER; note = 2'-O-methyl modified nucleotide
  modified_base 11: mod_base = OTHER; note = 2'-O-methyl modified nucleotide
  modified_base 15: mod_base = OTHER; note = 2'-O-methyl modified nucleotide
  modified_base 16: mod_base = OTHER; note = 2'-O-methyl modified nucleotide
  modified_base 19: mod_base = OTHER; note = 2'-O-methyl modified nucleotide
  modified_base 20: mod_base = OTHER; note = 2'-O-methyl modified nucleotide
  modified_base 22: mod_base = OTHER; note = 2'-O-methyl modified nucleotide
  modified_base 23: mod_base = OTHER; note = 2'-O-methyl modified nucleotide
  modified_base 24: mod_base = OTHER; note = 2'-O-methyl modified nucleotide
  modified_base 26: mod_base = OTHER; note = 2'-O-methyl modified nucleotide
  modified_base 27: mod_base = OTHER; note = 2'-O-methyl modified nucleotide
  modified_base 28: mod_base = OTHER; note = 2'-O-methyl modified nucleotide
  modified_base 29: mod_base = OTHER; note = 2'-O-methyl modified nucleotide
  modified_base 31: mod_base = OTHER; note = 2'-O-methyl modified nucleotide
  modified_base 38: mod_base = OTHER; note = 2'-O-methyl modified nucleotide
  modified_base 39: mod_base = OTHER; note = 2'-O-methyl modified nucleotide
  modified_base 40: mod_base = OTHER; note = 2'-O-methyl modified nucleotide
  modified_base 42: mod_base = OTHER; note = 2'-O-methyl modified nucleotide
  modified_base 49: mod_base = OTHER; note = 2'-O-methyl modified nucleotide with phosphorothioate linkage
  modified_base 50: mod_base = OTHER; note = 2'-O-methyl modified nucleotide with phosphorothioate linkage
  modified_base 51: mod_base = OTHER; note = 2'-O-methyl modified nucleotide
  misc_feature 1..9: note = DNA
  misc_feature 10..51: note = RNA

SEQ ID NO: 695 - DNA, 57 bp, synthetic construct; identical to SEQ ID NO: 358
  source 1..57: mol_type = other DNA
  modified_base 1: mod_base = OTHER; note = Nucleotide with phosphorothioate linkage
  modified_base 2: mod_base = OTHER; note = Nucleotide with phosphorothioate linkage
  modified_base 16: mod_base = OTHER; note = 2'-O-methyl modified nucleotide
  modified_base 17: mod_base = OTHER; note = 2'-O-methyl modified nucleotide
  modified_base 21: mod_base = OTHER; note = 2'-O-methyl modified nucleotide
  modified_base 22: mod_base = OTHER; note = 2'-O-methyl modified nucleotide
  modified_base 25: mod_base = OTHER; note = 2'-O-methyl modified nucleotide
  modified_base 26: mod_base = OTHER; note = 2'-O-methyl modified nucleotide
  modified_base 28: mod_base = OTHER; note = 2'-O-methyl modified nucleotide
  modified_base 29: mod_base = OTHER; note = 2'-O-methyl modified nucleotide
  modified_base 30: mod_base = OTHER; note = 2'-O-methyl modified nucleotide
  modified_base 32: mod_base = OTHER; note = 2'-O-methyl modified nucleotide
  modified_base 33: mod_base = OTHER; note = 2'-O-methyl modified nucleotide
  modified_base 34: mod_base = OTHER; note = 2'-O-methyl modified nucleotide
  modified_base 35: mod_base = OTHER; note = 2'-O-methyl modified nucleotide
  modified_base 37: mod_base = OTHER; note = 2'-O-methyl modified nucleotide
  modified_base 44: mod_base = OTHER; note = 2'-O-methyl modified nucleotide
  modified_base 45: mod_base = OTHER; note = 2'-O-methyl modified nucleotide
  modified_base 46: mod_base = OTHER; note = 2'-O-methyl modified nucleotide
  modified_base 48: mod_base = OTHER; note = 2'-O-methyl modified nucleotide
  modified_base 55: mod_base = OTHER; note = 2'-O-methyl modified nucleotide with phosphorothioate linkage
  modified_base 56: mod_base = OTHER; note = 2'-O-methyl modified nucleotide with phosphorothioate linkage
  modified_base 57: mod_base = OTHER; note = 2'-O-methyl modified nucleotide
  misc_feature 1..15: note = DNA
  misc_feature 16..57: note = RNA

SEQ ID NO: 696 - DNA, 67 bp, synthetic construct; identical to SEQ ID NO: 359
  source 1..67: mol_type = other DNA
  modified_base 1: mod_base = OTHER; note = Nucleotide with phosphorothioate linkage
  modified_base 2: mod_base = OTHER; note = Nucleotide with phosphorothioate linkage
  modified_base 26: mod_base = OTHER; note = 2'-O-methyl modified nucleotide
  modified_base 27: mod_base = OTHER; note = 2'-O-methyl modified nucleotide
  modified_base 31: mod_base = OTHER; note = 2'-O-methyl modified nucleotide
  modified_base 32: mod_base = OTHER; note = 2'-O-methyl modified nucleotide
  modified_base 35: mod_base = OTHER; note = 2'-O-methyl modified nucleotide
  modified_base 36: mod_base = OTHER; note = 2'-O-methyl modified nucleotide
  modified_base 38: mod_base = OTHER; note = 2'-O-methyl modified nucleotide
  modified_base 39: mod_base = OTHER; note = 2'-O-methyl modified nucleotide
  modified_base 40: mod_base = OTHER; note = 2'-O-methyl modified nucleotide
  modified_base 42: mod_base = OTHER; note = 2'-O-methyl modified nucleotide
  modified_base 43: mod_base = OTHER; note = 2'-O-methyl modified nucleotide
  modified_base 44: mod_base = OTHER; note = 2'-O-methyl modified nucleotide
  modified_base 45: mod_base = OTHER; note = 2'-O-methyl modified nucleotide
  modified_base 47: mod_base = OTHER; note = 2'-O-methyl modified nucleotide
  modified_base 54: mod_base = OTHER; note = 2'-O-methyl modified nucleotide
  modified_base 55: mod_base = OTHER; note = 2'-O-methyl modified nucleotide
  modified_base 56: mod_base = OTHER; note = 2'-O-methyl modified nucleotide
  modified_base 58: mod_base = OTHER; note = 2'-O-methyl modified nucleotide
  modified_base 65: mod_base = OTHER; note = 2'-O-methyl modified nucleotide with phosphorothioate linkage
  modified_base 66: mod_base = OTHER; note = 2'-O-methyl modified nucleotide with phosphorothioate linkage
  modified_base 67: mod_base = OTHER; note = 2'-O-methyl modified nucleotide
  misc_feature 1..25: note = DNA
  misc_feature 26..67: note = RNA

SEQ ID NO: 697 - DNA, 46 bp, synthetic construct; identical to SEQ ID NO: 356
  source 1..46: mol_type = other DNA
  modified_base 1: mod_base = OTHER; note = Nucleotide with phosphorothioate linkage
  modified_base 2: mod_base = OTHER; note = Nucleotide with phosphorothioate linkage
  modified_base 44: mod_base = OTHER; note = Nucleotide with phosphorothioate linkage
  modified_base 45: mod_base = OTHER; note = 2'-O-methyl modified nucleotide with phosphorothioate linkage
  modified_base 46: mod_base = OTHER; note = 2'-O-methyl modified nucleotide
  misc_feature 1..4: note = DNA
  misc_feature 5..46: note = RNA

SEQ ID NO: 698 - DNA, 51 bp, synthetic construct; identical to SEQ ID NO: 357
  source 1..51: mol_type = other DNA
  modified_base 1: mod_base = OTHER; note = Nucleotide with phosphorothioate linkage
  modified_base 2: mod_base = OTHER; note = Nucleotide with phosphorothioate linkage
  modified_base 49: mod_base = OTHER; note = Nucleotide with phosphorothioate linkage
  modified_base 50: mod_base = OTHER; note = 2'-O-methyl modified nucleotide with phosphorothioate linkage
  modified_base 51: mod_base = OTHER; note = 2'-O-methyl modified nucleotide
  misc_feature 1..9: note = DNA
  misc_feature 10..51: note = RNA

SEQ ID NO: 699 - DNA, 57 bp, synthetic construct; identical to SEQ ID NO: 358
  source 1..57: mol_type = other DNA
  modified_base 1: mod_base = OTHER; note = Nucleotide with phosphorothioate linkage
  modified_base 2: mod_base = OTHER; note = Nucleotide with phosphorothioate linkage
  modified_base 55: mod_base = OTHER; note = Nucleotide with phosphorothioate linkage
  modified_base 56: mod_base = OTHER; note = 2'-O-methyl modified nucleotide with phosphorothioate linkage
  modified_base 57: mod_base = OTHER; note = 2'-O-methyl modified nucleotide
  misc_feature 1..15: note = DNA
  misc_feature 16..57: note = RNA

SEQ ID NO: 700 - DNA, 67 bp, synthetic construct; identical to SEQ ID NO: 359
  source 1..67: mol_type = other DNA
  modified_base 1: mod_base = OTHER; note = Nucleotide with phosphorothioate linkage
  modified_base 2: mod_base = OTHER; note = Nucleotide with phosphorothioate linkage
  modified_base 65: mod_base = OTHER; note = Nucleotide with phosphorothioate linkage
  modified_base 66: mod_base = OTHER; note = 2'-O-methyl modified nucleotide with phosphorothioate linkage
  modified_base 67: mod_base = OTHER; note = 2'-O-methyl modified nucleotide
  misc_feature 1..25: note = DNA
  misc_feature 26..67: note = RNA

SEQ ID NO: 701 - RNA, 46 nt, synthetic construct; identical to SEQ ID NO: 321
  source 1..46: mol_type = other RNA
  modified_base 1: mod_base = OTHER; note = 2'-O-methyl modified nucleotide with phosphorothioate linkage
  modified_base 2: mod_base = OTHER; note = 2'-O-methyl modified nucleotide with phosphorothioate linkage
  modified_base 5: mod_base = OTHER; note = 2'-O-methyl modified nucleotide
  modified_base 6: mod_base = OTHER; note = 2'-O-methyl modified nucleotide
  modified_base 10: mod_base = OTHER; note = 2'-O-methyl modified nucleotide
  modified_base 11: mod_base = OTHER; note = 2'-O-methyl modified nucleotide
  modified_base 14: mod_base = OTHER; note = 2'-O-methyl modified nucleotide
  modified_base 15: mod_base = OTHER; note = 2'-O-methyl modified nucleotide
  modified_base 17: mod_base = OTHER; note = 2'-O-methyl modified nucleotide
  modified_base 18: mod_base = OTHER; note = 2'-O-methyl modified nucleotide
  modified_base 19: mod_base = OTHER; note = 2'-O-methyl modified nucleotide
  modified_base 21: mod_base = OTHER; note = 2'-O-methyl modified nucleotide
  modified_base 22: mod_base = OTHER; note = 2'-O-methyl modified nucleotide
  modified_base 23: mod_base = OTHER; note = 2'-O-methyl modified nucleotide
  modified_base 24: mod_base = OTHER; note = 2'-O-methyl modified nucleotide
  modified_base 26: mod_base = OTHER; note = 2'-O-methyl modified nucleotide
  modified_base 33: mod_base = OTHER; note = 2'-O-methyl modified nucleotide
  modified_base 34: mod_base = OTHER; note = 2'-O-methyl modified nucleotide
  modified_base 35: mod_base = OTHER; note = 2'-O-methyl modified nucleotide
  modified_base 37: mod_base = OTHER; note = 2'-O-methyl modified nucleotide
  modified_base 44: mod_base = OTHER; note = 2'-O-methyl modified nucleotide with phosphorothioate linkage
  modified_base 45: mod_base = OTHER; note = 2'-O-methyl modified nucleotide with phosphorothioate linkage
  modified_base 46: mod_base = OTHER; note = 2'-O-methyl modified nucleotide

SEQ ID NO: 702 - RNA, 51 nt, synthetic construct; identical to SEQ ID NO: 322
  source 1..51: mol_type = other RNA
  modified_base 1: mod_base = OTHER; note = 2'-O-methyl modified nucleotide with phosphorothioate linkage
  modified_base 2: mod_base = OTHER; note = 2'-O-methyl modified nucleotide with phosphorothioate linkage
  modified_base 10: mod_base = OTHER; note = 2'-O-methyl modified nucleotide
  modified_base 11: mod_base = OTHER; note = 2'-O-methyl modified nucleotide
  modified_base 15: mod_base = OTHER; note = 2'-O-methyl modified nucleotide
  modified_base 16: mod_base = OTHER; note = 2'-O-methyl modified nucleotide
  modified_base 19: mod_base = OTHER; note = 2'-O-methyl modified nucleotide
  modified_base 20: mod_base = OTHER; note = 2'-O-methyl modified nucleotide
  modified_base 22: mod_base = OTHER; note = 2'-O-methyl modified nucleotide
  modified_base 23: mod_base = OTHER; note = 2'-O-methyl modified nucleotide
  modified_base 24: mod_base = OTHER; note = 2'-O-methyl modified nucleotide
  modified_base 26: mod_base = OTHER; note = 2'-O-methyl modified nucleotide
  modified_base 27: mod_base = OTHER; note = 2'-O-methyl modified nucleotide
  modified_base 28: mod_base = OTHER; note = 2'-O-methyl modified nucleotide
  modified_base 29: mod_base = OTHER; note = 2'-O-methyl modified nucleotide
  modified_base 31: mod_base = OTHER; note = 2'-O-methyl modified nucleotide
  modified_base 38: mod_base = OTHER; note = 2'-O-methyl modified nucleotide
  modified_base 39: mod_base = OTHER; note = 2'-O-methyl modified nucleotide
  modified_base 40: mod_base = OTHER; note = 2'-O-methyl modified nucleotide
  modified_base 42: mod_base = OTHER; note = 2'-O-methyl modified nucleotide
  modified_base 49: mod_base = OTHER; note = 2'-O-methyl modified nucleotide with phosphorothioate linkage
  modified_base 50: mod_base = OTHER; note = 2'-O-methyl modified nucleotide with phosphorothioate linkage
  modified_base 51: mod_base = OTHER; note = 2'-O-methyl modified nucleotide

SEQ ID NO: 703 - RNA, 57 nt, synthetic construct; identical to SEQ ID NO: 323
  source 1..57: mol_type = other RNA
  modified_base 1: mod_base = OTHER; note = 2'-O-methyl modified nucleotide with phosphorothioate linkage
  modified_base 2: mod_base = OTHER; note = 2'-O-methyl modified nucleotide with phosphorothioate linkage
  modified_base 16: mod_base = OTHER; note = 2'-O-methyl modified nucleotide
  modified_base 17: mod_base = OTHER; note = 2'-O-methyl modified nucleotide
  modified_base 21: mod_base = OTHER; note = 2'-O-methyl modified nucleotide
  modified_base 22: mod_base = OTHER; note = 2'-O-methyl modified nucleotide
  modified_base 25: mod_base = OTHER; note = 2'-O-methyl modified nucleotide
  modified_base 26: mod_base = OTHER; note = 2'-O-methyl modified nucleotide
  modified_base 28: mod_base = OTHER; note = 2'-O-methyl modified nucleotide
  modified_base 29: mod_base = OTHER; note = 2'-O-methyl modified nucleotide
  modified_base 30: mod_base = OTHER; note = 2'-O-methyl modified nucleotide
  modified_base 32: mod_base = OTHER; note = 2'-O-methyl modified nucleotide
  modified_base 33: mod_base = OTHER; note = 2'-O-methyl modified nucleotide
  modified_base 34: mod_base = OTHER; note = 2'-O-methyl modified nucleotide
  modified_base 35: mod_base = OTHER; note = 2'-O-methyl modified nucleotide
  modified_base 37: mod_base = OTHER; note = 2'-O-methyl modified nucleotide
  modified_base 44: mod_base = OTHER; note = 2'-O-methyl modified nucleotide
  modified_base 45: mod_base = OTHER; note = 2'-O-methyl modified nucleotide
  modified_base 46: mod_base = OTHER; note = 2'-O-methyl modified nucleotide
  modified_base 48: mod_base = OTHER; note = 2'-O-methyl modified nucleotide
  modified_base 55: mod_base = OTHER; note = 2'-O-methyl modified nucleotide with phosphorothioate linkage
  modified_base 56: mod_base = OTHER; note = 2'-O-methyl modified nucleotide with phosphorothioate linkage
  modified_base 57: mod_base = OTHER; note = 2'-O-methyl modified nucleotide

SEQ ID NO: 704 - RNA, 67 nt, synthetic construct; identical to SEQ ID NO: 324
  source 1..67: mol_type = other RNA
  modified_base 1: mod_base = OTHER; note = 2'-O-methyl modified nucleotide with phosphorothioate linkage
  modified_base 2: mod_base = OTHER; note = 2'-O-methyl modified nucleotide with phosphorothioate linkage
  modified_base 26: mod_base = OTHER; note = 2'-O-methyl modified nucleotide
  modified_base 27: mod_base = OTHER; note = 2'-O-methyl modified nucleotide
  modified_base 31: mod_base = OTHER; note = 2'-O-methyl modified nucleotide
  modified_base 32: mod_base = OTHER; note = 2'-O-methyl modified nucleotide
  modified_base 35: mod_base = OTHER; note = 2'-O-methyl modified nucleotide
  modified_base 36: mod_base = OTHER; note = 2'-O-methyl modified nucleotide
  modified_base 38: mod_base = OTHER; note = 2'-O-methyl modified nucleotide
  modified_base 39: mod_base = OTHER; note = 2'-O-methyl modified nucleotide
  modified_base 40: mod_base = OTHER; note = 2'-O-methyl modified nucleotide
  modified_base 42: mod_base = OTHER; note = 2'-O-methyl modified nucleotide
  modified_base 43: mod_base = OTHER; note = 2'-O-methyl modified nucleotide
  modified_base 44: mod_base = OTHER; note = 2'-O-methyl modified nucleotide
  modified_base 45: mod_base = OTHER; note = 2'-O-methyl modified nucleotide
  modified_base 47: mod_base = OTHER; note = 2'-O-methyl modified nucleotide
  modified_base 54: mod_base = OTHER; note = 2'-O-methyl modified nucleotide
  modified_base 55: mod_base = OTHER; note = 2'-O-methyl modified nucleotide
  modified_base 56: mod_base = OTHER; note = 2'-O-methyl modified nucleotide
  modified_base 58: mod_base = OTHER; note = 2'-O-methyl modified nucleotide
  modified_base 65: mod_base = OTHER; note = 2'-O-methyl modified nucleotide with phosphorothioate linkage
  modified_base 66: mod_base = OTHER; note = 2'-O-methyl modified nucleotide with phosphorothioate linkage
  modified_base 67: mod_base = OTHER; note = 2'-O-methyl modified nucleotide

SEQ ID NO: 705 - RNA, 48 nt, synthetic construct; identical to SEQ ID NO: 334
  source 1..48: mol_type = other RNA
  modified_base 1: mod_base = OTHER; note = 2'-O-methyl modified nucleotide with phosphorothioate linkage
  modified_base 2: mod_base = OTHER; note = 2'-O-methyl modified nucleotide with phosphorothioate linkage
  modified_base 5: mod_base = OTHER; note = 2'-O-methyl modified nucleotide
  modified_base 6: mod_base = OTHER; note = 2'-O-methyl modified nucleotide
  modified_base 12: mod_base = OTHER; note = 2'-O-methyl modified nucleotide
  modified_base 13: mod_base = OTHER; note = 2'-O-methyl modified nucleotide
  modified_base 17: mod_base = OTHER; note = 2'-O-methyl modified nucleotide
  modified_base 19: mod_base = OTHER; note = 2'-O-methyl modified nucleotide
  modified_base 20: mod_base = OTHER; note = 2'-O-methyl modified nucleotide
  modified_base 21: mod_base = OTHER; note = 2'-O-methyl modified nucleotide
  modified_base 24: mod_base = OTHER; note = 2'-O-methyl modified nucleotide
  modified_base 25: mod_base = OTHER; note = 2'-O-methyl modified nucleotide
  modified_base 26: mod_base = OTHER; note = 2'-O-methyl modified nucleotide
  modified_base 28: mod_base = OTHER; note = 2'-O-methyl modified nucleotide
  modified_base 35: mod_base = OTHER; note = 2'-O-methyl modified nucleotide
  modified_base 36: mod_base = OTHER; note = 2'-O-methyl modified nucleotide
  modified_base 37: mod_base = OTHER; note = 2'-O-methyl modified nucleotide
  modified_base 39: mod_base = OTHER; note = 2'-O-methyl modified nucleotide
  modified_base 46: mod_base = OTHER; note = 2'-O-methyl modified nucleotide with phosphorothioate linkage
  modified_base 47: mod_base = OTHER; note = 2'-O-methyl modified nucleotide with phosphorothioate linkage
  modified_base 48: mod_base = OTHER; note = 2'-O-methyl modified nucleotide

SEQ ID NO: 706 - RNA, 53 nt, synthetic construct; identical to SEQ ID NO: 335
  source 1..53: mol_type = other RNA
  modified_base 1: mod_base = OTHER; note = 2'-O-methyl modified nucleotide with phosphorothioate linkage
  modified_base 2: mod_base = OTHER; note = 2'-O-methyl modified nucleotide with phosphorothioate linkage
  modified_base 10: mod_base = OTHER; note = 2'-O-methyl modified nucleotide
  modified_base 11: mod_base = OTHER; note = 2'-O-methyl modified nucleotide
  modified_base 17: mod_base = OTHER; note = 2'-O-methyl modified nucleotide
  modified_base 18: mod_base = OTHER; note = 2'-O-methyl modified nucleotide
  modified_base 22: mod_base = OTHER; note = 2'-O-methyl modified nucleotide
  modified_base 24: mod_base = OTHER; note = 2'-O-methyl modified nucleotide
  modified_base 25: mod_base = OTHER; note = 2'-O-methyl modified nucleotide
  modified_base 26: mod_base = OTHER; note = 2'-O-methyl modified nucleotide
  modified_base 29: mod_base = OTHER; note = 2'-O-methyl modified nucleotide
  modified_base 30: mod_base = OTHER; note = 2'-O-methyl modified nucleotide
  modified_base 31: mod_base = OTHER; note = 2'-O-methyl modified nucleotide
  modified_base 33: mod_base = OTHER; note = 2'-O-methyl modified nucleotide
  modified_base 40: mod_base = OTHER; note = 2'-O-methyl modified nucleotide
  modified_base 41: mod_base = OTHER; note = 2'-O-methyl modified nucleotide
  modified_base 42: mod_base = OTHER; note = 2'-O-methyl modified nucleotide
  modified_base 44: mod_base = OTHER; note = 2'-O-methyl modified nucleotide
  modified_base 51: mod_base = OTHER; note = 2'-O-methyl modified nucleotide with phosphorothioate linkage
  modified_base 52: mod_base = OTHER; note = 2'-O-methyl modified nucleotide with phosphorothioate linkage
  modified_base 53: mod_base = OTHER; note = 2'-O-methyl modified nucleotide

SEQ ID NO: 707 - RNA, 59 nt, synthetic construct; identical to SEQ ID NO: 336
  source 1..59: mol_type = other RNA
  modified_base 1: mod_base = OTHER; note = 2'-O-methyl modified nucleotide with phosphorothioate linkage
  modified_base 2: mod_base = OTHER; note = 2'-O-methyl modified nucleotide with phosphorothioate linkage
  modified_base 16: mod_base = OTHER; note = 2'-O-methyl modified nucleotide
  modified_base 17: mod_base = OTHER; note = 2'-O-methyl modified nucleotide
  modified_base 23: mod_base = OTHER; note = 2'-O-methyl modified nucleotide
  modified_base 24: mod_base = OTHER; note = 2'-O-methyl modified nucleotide
  modified_base 28: mod_base = OTHER; note = 2'-O-methyl modified nucleotide
  modified_base 30: mod_base = OTHER; note = 2'-O-methyl modified nucleotide
  modified_base 31: mod_base = OTHER; note = 2'-O-methyl modified nucleotide
  modified_base 32: mod_base = OTHER; note = 2'-O-methyl modified nucleotide
  modified_base 35: mod_base = OTHER; note = 2'-O-methyl modified nucleotide
  modified_base 36: mod_base = OTHER; note = 2'-O-methyl modified nucleotide
  modified_base 37: mod_base = OTHER; note = 2'-O-methyl modified nucleotide
  modified_base 39: mod_base = OTHER; note = 2'-O-methyl modified nucleotide
  modified_base 46: mod_base = OTHER; note = 2'-O-methyl modified nucleotide
  modified_base 47: mod_base = OTHER; note = 2'-O-methyl modified nucleotide
  modified_base 48: mod_base = OTHER; note = 2'-O-methyl modified nucleotide
  modified_base 50: mod_base = OTHER; note = 2'-O-methyl modified nucleotide
  modified_base 57: mod_base = OTHER; note = 2'-O-methyl modified nucleotide with phosphorothioate linkage
  modified_base 58: mod_base = OTHER; note = 2'-O-methyl modified nucleotide with phosphorothioate linkage
  modified_base 59: mod_base = OTHER; note = 2'-O-methyl modified nucleotide

SEQ ID NO: 708 - RNA, 69 nt, synthetic construct; identical to SEQ ID NO: 337
  source 1..69: mol_type = other RNA
  modified_base 1: mod_base = OTHER; note = 2'-O-methyl modified nucleotide with phosphorothioate linkage
  modified_base 2: mod_base = OTHER; note = 2'-O-methyl modified nucleotide with phosphorothioate linkage
  modified_base 26: mod_base = OTHER; note = 2'-O-methyl modified nucleotide
  modified_base 27: mod_base = OTHER; note = 2'-O-methyl modified nucleotide
  modified_base 33: mod_base = OTHER; note = 2'-O-methyl modified nucleotide
  modified_base 34: mod_base = OTHER; note = 2'-O-methyl modified nucleotide
  modified_base 38: mod_base = OTHER; note = 2'-O-methyl modified nucleotide
  modified_base 40: mod_base = OTHER; note = 2'-O-methyl modified nucleotide
  modified_base 41: mod_base = OTHER; note = 2'-O-methyl modified nucleotide
  modified_base 42: mod_base = OTHER; note = 2'-O-methyl modified nucleotide
  modified_base 45: mod_base = OTHER; note = 2'-O-methyl modified nucleotide
  modified_base 46: mod_base = OTHER; note = 2'-O-methyl modified nucleotide
  modified_base 47: mod_base = OTHER; note = 2'-O-methyl modified nucleotide
  modified_base 49: mod_base = OTHER; note = 2'-O-methyl modified nucleotide
  modified_base 56: mod_base = OTHER; note = 2'-O-methyl modified nucleotide
  modified_base 57: mod_base = OTHER; note = 2'-O-methyl modified nucleotide
  modified_base 58: mod_base = OTHER; note = 2'-O-methyl modified nucleotide
  modified_base 60: mod_base = OTHER; note = 2'-O-methyl modified nucleotide
  modified_base 67: mod_base = OTHER; note = 2'-O-methyl modified nucleotide with phosphorothioate linkage
  modified_base 68: mod_base = OTHER; note = 2'-O-methyl modified nucleotide with phosphorothioate linkage
  modified_base 69: mod_base = OTHER; note = 2'-O-methyl modified nucleotide

SEQ ID NO: 709 - RNA, 45 nt, synthetic construct; identical to SEQ ID NO: 685
  source 1..45: mol_type = other RNA
  modified_base 1: mod_base = OTHER; note = 2'-O-methyl modified nucleotide with phosphorothioate linkage
  modified_base 2: mod_base = OTHER; note = 2'-O-methyl modified nucleotide with phosphorothioate linkage
  modified_base 5: mod_base = OTHER; note = 2'-O-methyl modified nucleotide
  modified_base 6: mod_base = OTHER; note = 2'-O-methyl modified nucleotide
  modified_base 10: mod_base = OTHER; note = 2'-O-methyl modified nucleotide
  modified_base 11: mod_base = OTHER; note = 2'-O-methyl modified nucleotide
  modified_base 14: mod_base = OTHER; note = 2'-O-methyl modified nucleotide
  modified_base 15: mod_base = OTHER; note = 2'-O-methyl modified nucleotide
  modified_base 17: mod_base = OTHER; note = 2'-O-methyl modified nucleotide
  modified_base 18: mod_base = OTHER; note = 2'-O-methyl modified nucleotide
  modified_base 19: mod_base = OTHER; note = 2'-O-methyl modified nucleotide
  modified_base 21: mod_base = OTHER; note = 2'-O-methyl modified nucleotide
  modified_base 22: mod_base = OTHER; note = 2'-O-methyl modified nucleotide
  modified_base 23: mod_base = OTHER; note = 2'-O-methyl modified nucleotide
  modified_base 24: mod_base = OTHER; note = 2'-O-methyl modified nucleotide
  modified_base 26: mod_base = OTHER; note = 2'-O-methyl modified nucleotide
  modified_base 33: mod_base = OTHER; note = 2'-O-methyl modified nucleotide
  modified_base 34: mod_base = OTHER; note = 2'-O-methyl modified nucleotide
  modified_base 35: mod_base = OTHER; note = 2'-O-methyl modified nucleotide
  modified_base 37: mod_base = OTHER; note = 2'-O-methyl modified nucleotide
  modified_base 43: mod_base = OTHER; note = Nucleotide with phosphorothioate linkage
  modified_base 44: mod_base = OTHER; note = 2'-O-methyl modified nucleotide with phosphorothioate linkage
  modified_base 45: mod_base = OTHER; note = 2'-O-methyl modified nucleotide

SEQ ID NO: 710 - RNA, 50 nt, synthetic construct; identical to SEQ ID NO: 686
  source 1..50: mol_type = other RNA
  modified_base 1: mod_base = OTHER; note = 2'-O-methyl modified nucleotide with phosphorothioate linkage
  modified_base 2: mod_base = OTHER; note = 2'-O-methyl modified nucleotide with phosphorothioate linkage
  modified_base 10: mod_base = OTHER; note = 2'-O-methyl modified nucleotide
  modified_base 11: mod_base = OTHER; note = 2'-O-methyl modified nucleotide
  modified_base 15: mod_base = OTHER; note = 2'-O-methyl modified nucleotide
  modified_base 16: mod_base = OTHER; note = 2'-O-methyl modified nucleotide
  modified_base 19: mod_base = OTHER; note = 2'-O-methyl modified nucleotide
  modified_base 20: mod_base = OTHER; note = 2'-O-methyl modified nucleotide
  modified_base 22: mod_base = OTHER; note = 2'-O-methyl modified nucleotide
  modified_base 23: mod_base = OTHER; note = 2'-O-methyl modified nucleotide
  modified_base 24: mod_base = OTHER; note = 2'-O-methyl modified nucleotide
  modified_base 26: mod_base = OTHER; note = 2'-O-methyl modified nucleotide
  modified_base 27: mod_base = OTHER; note = 2'-O-methyl modified nucleotide
  modified_base 28: mod_base = OTHER; note = 2'-O-methyl modified nucleotide
  modified_base 29: mod_base = OTHER; note = 2'-O-methyl modified nucleotide
  modified_base 31: mod_base = OTHER; note = 2'-O-methyl modified nucleotide
  modified_base 38: mod_base = OTHER; note = 2'-O-methyl modified nucleotide
  modified_base 39: mod_base = OTHER; note = 2'-O-methyl modified nucleotide
  modified_base 40: mod_base = OTHER; note = 2'-O-methyl modified nucleotide
  modified_base 42: mod_base = OTHER; note = 2'-O-methyl modified nucleotide
  modified_base 48: mod_base = OTHER; note = Nucleotide with phosphorothioate linkage
  modified_base 49: mod_base = OTHER; note = 2'-O-methyl modified nucleotide with phosphorothioate linkage
  modified_base 50: mod_base = OTHER; note = 2'-O-methyl modified nucleotide

SEQ ID NO: 711 - RNA, 56 nt, synthetic construct; identical to SEQ ID NO: 687
  source 1..56: mol_type = other RNA
  modified_base 1: mod_base = OTHER; note = 2'-O-methyl modified nucleotide with phosphorothioate linkage
  modified_base 2: mod_base = OTHER; note = 2'-O-methyl modified nucleotide with phosphorothioate linkage
  modified_base 16: mod_base = OTHER; note = 2'-O-methyl modified nucleotide
  modified_base 17: mod_base = OTHER; note = 2'-O-methyl modified nucleotide
  modified_base 21: mod_base = OTHER; note = 2'-O-methyl modified nucleotide
  modified_base 22: mod_base = OTHER; note = 2'-O-methyl modified nucleotide
  modified_base 25: mod_base = OTHER; note = 2'-O-methyl modified nucleotide
  modified_base 26: mod_base = OTHER; note = 2'-O-methyl modified nucleotide
  modified_base 28: mod_base = OTHER; note = 2'-O-methyl modified nucleotide
  modified_base 29: mod_base = OTHER; note = 2'-O-methyl modified nucleotide
  modified_base 30: mod_base = OTHER; note = 2'-O-methyl modified nucleotide
  modified_base 32: mod_base = OTHER; note = 2'-O-methyl modified nucleotide
  modified_base 33: mod_base = OTHER; note = 2'-O-methyl modified nucleotide
  modified_base 34: mod_base = OTHER; note = 2'-O-methyl modified nucleotide
  modified_base 35: mod_base = OTHER; note = 2'-O-methyl modified nucleotide
  modified_base 37: mod_base = OTHER; note = 2'-O-methyl modified nucleotide
  modified_base 44: mod_base = OTHER; note = 2'-O-methyl modified nucleotide
  modified_base 45: mod_base = OTHER; note = 2'-O-methyl modified nucleotide
  modified_base 46: mod_base = OTHER; note = 2'-O-methyl modified nucleotide
  modified_base 48: mod_base = OTHER; note = 2'-O-methyl modified nucleotide
  modified_base 54: mod_base = OTHER; note = Nucleotide with phosphorothioate linkage
  modified_base 55: mod_base = OTHER; note = 2'-O-methyl modified nucleotide with phosphorothioate linkage
  modified_base 56: mod_base = OTHER; note = 2'-O-methyl modified nucleotide

SEQ ID NO: 712 - RNA, 66 nt, synthetic construct; identical to SEQ ID NO: 688
  source 1..66: mol_type = other RNA
  modified_base 1: mod_base = OTHER; note = 2'-O-methyl modified nucleotide with phosphorothioate linkage
  modified_base 2: mod_base = OTHER; note = 2'-O-methyl modified nucleotide with phosphorothioate linkage
  modified_base 26: mod_base = OTHER; note = 2'-O-methyl modified nucleotide
  modified_base 27: mod_base = OTHER; note = 2'-O-methyl modified nucleotide
  modified_base 31: mod_base = OTHER; note = 2'-O-methyl modified nucleotide
  modified_base 32: mod_base = OTHER; note = 2'-O-methyl modified nucleotide
  modified_base 35: mod_base = OTHER; note = 2'-O-methyl modified nucleotide
  modified_base 36: mod_base = OTHER; note = 2'-O-methyl modified nucleotide
  modified_base 38: mod_base = OTHER; note = 2'-O-methyl modified nucleotide
  modified_base 39: mod_base = OTHER; note = 2'-O-methyl modified nucleotide
  modified_base 40: mod_base = OTHER; note = 2'-O-methyl modified nucleotide
  modified_base 42: mod_base = OTHER; note = 2'-O-methyl modified nucleotide
  modified_base 43: mod_base = OTHER; note = 2'-O-methyl modified nucleotide
  modified_base 44: mod_base = OTHER; note = 2'-O-methyl modified nucleotide
  modified_base 45: mod_base = OTHER; note = 2'-O-methyl modified nucleotide
  modified_base 47: mod_base = OTHER; note = 2'-O-methyl modified nucleotide
  modified_base 54: mod_base = OTHER; note = 2'-O-methyl modified nucleotide
  modified_base 55: mod_base = OTHER; note = 2'-O-methyl modified nucleotide
  modified_base 56: mod_base = OTHER; note = 2'-O-methyl modified nucleotide
  modified_base 58: mod_base = OTHER; note = 2'-O-methyl modified nucleotide
  modified_base 64: mod_base = OTHER; note = Nucleotide with phosphorothioate linkage
  modified_base 65: mod_base = OTHER; note = 2'-O-methyl modified nucleotide with phosphorothioate linkage
  modified_base 66: mod_base = OTHER; note = 2'-O-methyl modified nucleotide

SEQ ID NO: 713 - RNA, 47 nt, synthetic construct; identical to SEQ ID NO: 338
  source 1..47: mol_type = other RNA
  modified_base 1: mod_base = OTHER; note = 2'-O-methyl modified nucleotide with phosphorothioate linkage
  modified_base 2: mod_base = OTHER; note = 2'-O-methyl modified nucleotide with phosphorothioate linkage
  modified_base 45: mod_base = OTHER; note = Nucleotide with phosphorothioate linkage
  modified_base 46: mod_base = OTHER; note = 2'-O-methyl modified nucleotide with phosphorothioate linkage
  modified_base 47: mod_base = OTHER; note = 2'-O-methyl modified nucleotide

SEQ ID NO: 714 - RNA, 47 nt, synthetic construct; identical to SEQ ID NO: 339
  source 1..47: mol_type = other RNA
  modified_base 1: mod_base = OTHER; note = 2'-O-methyl modified nucleotide with phosphorothioate linkage
  modified_base 2: mod_base = OTHER; note = 2'-O-methyl modified nucleotide with phosphorothioate linkage
  modified_base 45: mod_base = OTHER; note = Nucleotide with phosphorothioate linkage
  modified_base 46: mod_base = OTHER; note = 2'-O-methyl modified nucleotide with phosphorothioate linkage
  modified_base 47: mod_base = OTHER; note = 2'-O-methyl modified nucleotide

SEQ ID NO: 715 - RNA, 45 nt, synthetic construct; identical to SEQ ID NO: 340
  source 1..45: mol_type = other RNA
  modified_base 1: mod_base = OTHER; note = 2'-O-methyl modified nucleotide with phosphorothioate linkage
  modified_base 2: mod_base = OTHER; note = 2'-O-methyl modified nucleotide with phosphorothioate linkage
  modified_base 43: mod_base = OTHER; note = Nucleotide with phosphorothioate linkage
  modified_base 44: mod_base = OTHER; note = 2'-O-methyl modified nucleotide with phosphorothioate linkage
  modified_base 45: mod_base = OTHER; note = 2'-O-methyl modified nucleotide

SEQ ID NO: 716 - RNA, 51 nt, synthetic construct; identical to SEQ ID NO: 341
  source 1..51: mol_type = other RNA
  modified_base 1: mod_base = OTHER; note = 2'-O-methyl modified nucleotide with phosphorothioate linkage
  modified_base 2: mod_base = OTHER; note = 2'-O-methyl modified nucleotide with phosphorothioate linkage
  modified_base 49: mod_base = OTHER; note = Nucleotide with phosphorothioate linkage
  modified_base 50: mod_base = OTHER; note = 2'-O-methyl modified nucleotide with phosphorothioate linkage
  modified_base 51: mod_base = OTHER; note = 2'-O-methyl modified nucleotide

SEQ ID NO: 717 - RNA, 45 nt, synthetic construct; identical to SEQ ID NO: 342
  source 1..45: mol_type = other RNA
  modified_base 1: mod_base = OTHER; note = 2'-O-methyl modified nucleotide with phosphorothioate linkage
  modified_base 2: mod_base = OTHER; note = 2'-O-methyl modified nucleotide with phosphorothioate linkage
  modified_base 43: mod_base = OTHER; note = Nucleotide with phosphorothioate linkage
  modified_base 44: mod_base = OTHER; note = 2'-O-methyl modified nucleotide with phosphorothioate linkage
  modified_base 45: mod_base = OTHER; note = 2'-O-methyl modified nucleotide

SEQ ID NO: 718 - RNA, 42 nt, synthetic construct; identical to SEQ ID NO: 207
  source 1..42: mol_type = other RNA
  modified_base 1: mod_base = OTHER; note = 2'-O-methyl modified nucleotide with phosphorothioate linkage
  modified_base 2: mod_base = OTHER; note = 2'-O-methyl modified nucleotide with phosphorothioate linkage
  modified_base 6: mod_base = OTHER; note = 2'-O-methyl modified nucleotide
  modified_base 7: mod_base = OTHER; note = 2'-O-methyl modified nucleotide
  modified_base 10: mod_base = OTHER; note = 2'-O-methyl modified nucleotide
  modified_base 11: mod_base = OTHER; note = 2'-O-methyl modified nucleotide
  modified_base 13: mod_base = OTHER; note = 2'-O-methyl modified nucleotide
  modified_base 14: mod_base = OTHER; note = 2'-O-methyl modified nucleotide
  modified_base 15: mod_base = OTHER; note = 2'-O-methyl modified nucleotide
  modified_base 17: mod_base = OTHER; note = 2'-O-methyl modified nucleotide
  modified_base 18: mod_base = OTHER; note = 2'-O-methyl modified nucleotide
  modified_base 21: mod_base = OTHER; note = 2'-O-methyl modified nucleotide
  modified_base 22: mod_base = OTHER; note = 2'-O-methyl modified nucleotide
  modified_base 29: mod_base = OTHER; note = 2'-O-methyl modified nucleotide
  modified_base 30: mod_base = OTHER; note = 2'-O-methyl modified nucleotide
  modified_base 31: mod_base = OTHER; note = 2'-O-methyl modified nucleotide
  modified_base 32: mod_base = OTHER; note = 2'-O-methyl modified nucleotide
  modified_base 33: mod_base = OTHER; note = 2'-O-methyl modified nucleotide
  modified_base 34: mod_base = OTHER; note = 2'-O-methyl modified nucleotide
  modified_base 40: mod_base = OTHER; note = 2'-O-methyl modified nucleotide with phosphorothioate linkage
  modified_base 41: mod_base = OTHER; note = 2'-O-methyl modified nucleotide with phosphorothioate linkage
  modified_base 42: mod_base = OTHER; note = 2'-O-methyl modified nucleotide

SEQ ID NO: 719 - RNA, 42 nt, synthetic construct; identical to SEQ ID NO: 207
  source 1..42: mol_type = other RNA
  modified_base 1: mod_base = OTHER; note = 2'-O-methyl modified nucleotide with phosphorothioate linkage
  modified_base 2: mod_base = OTHER; note = 2'-O-methyl modified nucleotide with phosphorothioate linkage
  modified_base 7: mod_base = OTHER; note = 2'-O-methyl modified nucleotide
  modified_base 10: mod_base = OTHER; note = 2'-O-methyl modified nucleotide
  modified_base 11: mod_base = OTHER; note = 2'-O-methyl modified nucleotide
  modified_base 13: mod_base = OTHER; note = 2'-O-methyl modified nucleotide
  modified_base 14: mod_base = OTHER; note = 2'-O-methyl modified nucleotide
  modified_base 15: mod_base = OTHER; note = 2'-O-methyl modified nucleotide
  modified_base 17: mod_base = OTHER; note = 2'-O-methyl modified nucleotide
  modified_base 18: mod_base = OTHER; note = 2'-O-methyl modified nucleotide
  modified_base 22: mod_base = OTHER; note = 2'-O-methyl modified nucleotide
  modified_base 29: mod_base = OTHER; note = 2'-O-methyl modified nucleotide
  modified_base 30: mod_base = OTHER; note = 2'-O-methyl modified nucleotide
  modified_base 31: mod_base = OTHER; note = 2'-O-methyl modified nucleotide
  modified_base 32: mod_base = OTHER; note = 2'-O-methyl modified nucleotide
  modified_base 40: mod_base = OTHER; note = 2'-O-methyl modified nucleotide with phosphorothioate linkage
  modified_base 41: mod_base = OTHER; note = 2'-O-methyl modified nucleotide with phosphorothioate linkage
  modified_base 42: mod_base = OTHER; note = 2'-O-methyl modified nucleotide

SEQ ID NO: 720 - RNA, 42 nt, synthetic construct; identical to SEQ ID NO: 207
  source 1..42: mol_type = other RNA
  modified_base 1: mod_base = OTHER; note = 2'-O-methyl modified nucleotide with phosphorothioate linkage
  modified_base 2: mod_base = OTHER; note = 2'-O-methyl modified nucleotide with phosphorothioate linkage
  modified_base 7: mod_base = OTHER; note = 2'-O-methyl modified nucleotide
  modified_base 10: mod_base = OTHER; note = 2'-O-methyl modified nucleotide
  modified_base 11: mod_base = OTHER; note = 2'-O-methyl modified nucleotide
  modified_base 13: mod_base = OTHER; note = 2'-O-methyl modified nucleotide
  modified_base 14: mod_base = OTHER; note = 2'-O-methyl modified nucleotide
  modified_base 15: mod_base = OTHER; note = 2'-O-methyl modified nucleotide
  modified_base 22: mod_base = OTHER; note = 2'-O-methyl modified nucleotide
  modified_base 29: mod_base = OTHER; note = 2'-O-methyl modified nucleotide
  modified_base 30: mod_base = OTHER; note = 2'-O-methyl modified nucleotide
  modified_base 31: mod_base = OTHER; note = 2'-O-methyl modified nucleotide
  modified_base 40: mod_base = OTHER; note = 2'-O-methyl modified nucleotide with phosphorothioate linkage
  modified_base 41: mod_base = OTHER; note = 2'-O-methyl modified nucleotide with phosphorothioate linkage
  modified_base 42: mod_base = OTHER; note = 2'-O-methyl modified nucleotide

SEQ ID NO: 721 - RNA, 22 nt, synthetic construct
  source 1..22: mol_type = other RNA
tggagtgtgacaatggtgtttg

SEQ ID NO: 722 - RNA, 23 nt, synthetic construct
  source 1..23: mol_type = other RNA
tgtagtgtttcctactttatgga

SEQ ID NO: 723 - RNA, 22 nt, synthetic construct
  source 1..22: mol_type = other RNA
tgtcagtttgtcaaatacccca

SEQ ID NO: 724 - RNA, 24 nt, synthetic construct
  source 1..24: mol_type = other RNA
ttaatgctaatcgtgataggggtt

SEQ ID NO: 725 - RNA, 22 nt, synthetic construct
  source 1..22: mol_type = other RNA
tctcccaacccttgtaccagtg

SEQ ID NO: 726 - RNA, 22 nt, synthetic construct
  source 1..22: mol_type = other RNA
acagtagtctgcacattggtta

SEQ ID NO: 727 - RNA, 23 nt, synthetic construct
  source 1..23: mol_type = other RNA
tctcacacagaaatcgcacccgt

SEQ ID NO: 728 - RNA, 23 nt, synthetic construct
  source 1..23: mol_type = other RNA
aacattcaacgctgtcggtgagt

SEQ ID NO: 729 - RNA, 22 nt, synthetic construct
  source 1..22: mol_type = other RNA
tgaggtaggaggttgtatagtt

SEQ ID NO: 730 - RNA, 22 nt, synthetic construct
  source 1..22: mol_type = other RNA
taatactgcctggtaatgatga

SEQ ID NO: 731 - RNA, 23 nt, synthetic construct
  source 1..23: mol_type = other RNA
taatactgccgggtaatgatgga

SEQ ID NO: 732 - RNA, 22 nt, synthetic construct
  source 1..22: mol_type = other RNA
gtgaaatgtttaggaccactag

SEQ ID NO: 733 - RNA, 22 nt, synthetic construct
  source 1..22: mol_type = other RNA
tccttcattccaccggagtctg

SEQ ID NO: 734 - RNA, 21 nt, synthetic construct
  source 1..21: mol_type = other RNA
cattattacttttggtacgcg

SEQ ID NO: 735 - RNA, 22 nt, synthetic construct
  source 1..22: mol_type = other RNA
tcgtaccgtgagtaataatgcg

SEQ ID NO: 736 - DNA, 22 bp, synthetic construct
  source 1..22: mol_type = other DNA
caaacaccattgtcacactcca

SEQ ID NO: 737 - DNA, 23 bp, synthetic construct
  source 1..23: mol_type = other DNA
tccataaagtaggaaacactaca

SEQ ID NO: 738 - DNA, 22 bp, synthetic construct
  source 1..22: mol_type = other DNA
tggggtatttgacaaactgaca

SEQ ID NO: 739 - DNA, 24 bp, synthetic construct
  source 1..24: mol_type = other DNA
aacccctatcacgattagcattaa

SEQ ID NO: 740 - DNA, 22 bp, synthetic construct
  source 1..22: mol_type = other DNA
cactggtacaagggttgggaga

SEQ ID NO: 741 - DNA, 22 bp, synthetic construct
  source 1..22: mol_type = other DNA
taaccaatgtgcagactactgt

SEQ ID NO: 742 - DNA, 23 bp, synthetic construct
  source 1..23: mol_type = other DNA
acgggtgcgatttctgtgtgaga

SEQ ID NO: 743 - DNA, 23 bp, synthetic construct
  source 1..23: mol_type = other DNA
actcaccgacagcgttgaatgtt

SEQ ID NO: 744 - DNA, 22 bp, synthetic construct
  source 1..22: mol_type = other DNA
aactatacaacctcctacctca

SEQ ID NO: 745 - DNA, 22 bp, synthetic construct
  source 1..22: mol_type = other DNA
tcatcattaccaggcagtatta

SEQ ID NO: 746 - DNA, 23 bp, synthetic construct
  source 1..23: mol_type = other DNA
tccatcattacccggcagtatta

SEQ ID NO: 747 - DNA, 22 bp, synthetic construct
  source 1..22: mol_type = other DNA
ctagtggtcctaaacatttcac

SEQ ID NO: 748 - DNA, 22 bp, synthetic construct
  source 1..22: mol_type = other DNA
cagactccggtggaatgaagga

SEQ ID NO: 749 - DNA, 21 bp, synthetic construct
  source 1..21: mol_type = other DNA
cgcgtaccaaaagtaataatg

SEQ ID NO: 750 - DNA, 22 bp, synthetic construct
  source 1..22: mol_type = other DNA
cgcattattactcacggtacga

SEQ ID NO: 751 - RNA, 100 nt, synthetic construct
  source 1..100: mol_type = other RNA
  modified_base 1: mod_base = OTHER; note = 2'-O-methyl modified nucleotide with phosphorothioate linkage
  modified_base 2: mod_base = OTHER; note = 2'-O-methyl modified nucleotide with phosphorothioate linkage
  modified_base 3: mod_base = OTHER; note = 2'-O-methyl modified nucleotide with phosphorothioate linkage
  modified_base 29: mod_base = OTHER; note = 2'-O-methyl modified nucleotide
  modified_base 30: mod_base = OTHER; note = 2'-O-methyl modified nucleotide
  modified_base 31: mod_base = OTHER; note = 2'-O-methyl modified nucleotide
  modified_base 32: mod_base = OTHER; note = 2'-O-methyl modified nucleotide
  modified_base 33: mod_base = OTHER; note = 2'-O-methyl modified nucleotide
  modified_base 34: mod_base = OTHER; note = 2'-O-methyl modified nucleotide
  modified_base 35: mod_base = OTHER; note = 2'-O-methyl modified nucleotide
  modified_base 36: mod_base = OTHER; note = 2'-O-methyl modified nucleotide
  modified_base 37: mod_base = OTHER; note = 2'-O-methyl modified nucleotide
  modified_base 38: mod_base = OTHER; note = 2'-O-methyl modified nucleotide
  modified_base 39: mod_base = OTHER; note = 2'-O-methyl modified nucleotide
  modified_base 40: mod_base = OTHER; note = 2'-O-methyl modified nucleotide
  modified_base 69: mod_base = OTHER; note = 2'-O-methyl modified nucleotide
  modified_base 70: mod_base = OTHER; note = 2'-O-methyl modified nucleotide
  modified_base 71: mod_base = OTHER; note = 2'-O-methyl modified nucleotide
  modified_base 72: mod_base = OTHER; note = 2'-O-methyl modified nucleotide
  modified_base 73: mod_base = OTHER; note = 2'-O-methyl modified nucleotide
  modified_base 74: mod_base = OTHER; note = 2'-O-methyl modified nucleotide
  modified_base 75: mod_base = OTHER; note = 2'-O-methyl modified nucleotide
  modified_base 76: mod_base = OTHER; note = 2'-O-methyl modified nucleotide
  modified_base 77: mod_base = OTHER; note = 2'-O-methyl modified nucleotide
  modified_base 78: mod_base = OTHER; note = 2'-O-methyl modified nucleotide
  modified_base 79: mod_base = OTHER; note = 2'-O-methyl modified nucleotide
  modified_base 80: mod_base = OTHER; note = 2'-O-methyl modified nucleotide
  modified_base 81: mod_base = OTHER; note = 2'-O-methyl modified nucleotide
  modified_base 82: mod_base = OTHER; note = 2'-O-methyl modified nucleotide
  modified_base 83: mod_base = OTHER; note = 2'-O-methyl modified nucleotide
  modified_base 84: mod_base = OTHER; note = 2'-O-methyl modified nucleotide
  modified_base 85: mod_base = OTHER; note = 2'-O-methyl modified nucleotide
  modified_base 86: mod_base = OTHER; note = 2'-O-methyl modified nucleotide
  modified_base 87: mod_base = OTHER; note = 2'-O-methyl modified nucleotide
  modified_base 88: mod_base = OTHER; note = 2'-O-methyl modified nucleotide
  modified_base 89: mod_base = OTHER; note = 2'-O-methyl modified nucleotide
  modified_base 90: mod_base = OTHER; note = 2'-O-methyl modified nucleotide
  modified_base 91: mod_base = OTHER; note = 2'-O-methyl modified nucleotide
  modified_base 92: mod_base = OTHER; note = 2'-O-methyl modified nucleotide
  modified_base 93: mod_base = OTHER; note = 2'-O-methyl modified nucleotide
  modified_base 94: mod_base = OTHER; note = 2'-O-methyl modified nucleotide
  modified_base 95: mod_base = OTHER; note = 2'-O-methyl modified nucleotide
  modified_base 96: mod_base = OTHER; note = 2'-O-methyl modified nucleotide
  modified_base 97: mod_base = OTHER; note = 2'-O-methyl modified nucleotide with phosphorothioate linkage
  modified_base 98: mod_base = OTHER; note = 2'-O-methyl modified nucleotide with phosphorothioate linkage
  modified_base 99: mod_base = OTHER; note = 2'-O-methyl modified nucleotide with phosphorothioate linkage
  modified_base 100: mod_base = OTHER; note = 2'-O-methyl modified nucleotide
acacaaataccagtccagcggttttagagctagaaatagcaagttaaaataaggctagtccgttatcaacttcaaaaagtggcaccgagtcggtgctttt

SEQ ID NO: 752 - RNA, 100 nt, synthetic construct
  source 1..100: mol_type = other RNA
  misc_difference 1: note = 2'-O-methyl modified adenosine, cytidine, uridine, guanosine, unknown or other nucleotide with phosphorothioate linkage
  misc_difference 2: note = 2'-O-methyl modified adenosine, cytidine, uridine, guanosine, unknown or other nucleotide with phosphorothioate linkage
  misc_difference 3: note = 2'-O-methyl modified adenosine, cytidine, uridine, guanosine, unknown or other nucleotide with phosphorothioate linkage
  misc_difference 4: note = a, c, u, g, unknown or other
  misc_difference 5: note = a, c, u, g, unknown or other
  misc_difference 6: note = a, c, u, g, unknown or other
  misc_difference 7: note = a, c, u, g, unknown or other
  misc_difference 8: note = a, c, u, g, unknown or other
  misc_difference 9: note = a, c, u, g, unknown or other
  misc_difference 10: note = a, c, u, g, unknown or other
  misc_difference 11: note = a, c, u, g, unknown or other
  misc_difference 12: note = a, c, u, g, unknown or other
  misc_difference 13: note = a, c, u, g, unknown or other
  misc_difference 14: note = a, c, u, g, unknown or other
  misc_difference 15: note = a, c, u, g, unknown or other
  misc_difference 16: note = a, c, u, g, unknown or other
  misc_difference 17: note = a, c, u, g, unknown or other
  misc_difference 18: note = a, c, u, g, unknown or other
  misc_difference 19: note = a, c, u, g, unknown or other
  misc_difference 20: note = a, c, u, g, unknown or other
  modified_base 29: mod_base = OTHER; note = 2'-O-methyl modified nucleotide
  modified_base 30: mod_base = OTHER; note = 2'-O-methyl modified nucleotide
  modified_base 31: mod_base = OTHER; note = 2'-O-methyl modified nucleotide
  modified_base 32: mod_base = OTHER; note = 2'-O-methyl modified nucleotide
  modified_base 33: mod_base = OTHER; note = 2'-O-methyl modified nucleotide
  modified_base 34: mod_base = OTHER; note = 2'-O-methyl modified nucleotide
  modified_base 35: mod_base = OTHER; note = 2'-O-methyl modified nucleotide
  modified_base 36: mod_base = OTHER; note = 2'-O-methyl modified nucleotide
  modified_base 37: mod_base = OTHER; note = 2'-O-methyl modified nucleotide
  modified_base 38: mod_base = OTHER; note = 2'-O-methyl modified nucleotide
  modified_base 39: mod_base = OTHER; note = 2'-O-methyl modified nucleotide
  modified_base 40: mod_base = OTHER; note = 2'-O-methyl modified nucleotide
  modified_base 69: mod_base = OTHER; note = 2'-O-methyl modified nucleotide
  modified_base 70: mod_base = OTHER; note = 2'-O-methyl modified nucleotide
  modified_base 71: mod_base = OTHER; note = 2'-O-methyl modified nucleotide
  modified_base 72: mod_base = OTHER; note = 2'-O-methyl modified nucleotide
  modified_base 73: mod_base = OTHER; note = 2'-O-methyl modified nucleotide
  modified_base 74: mod_base = OTHER; note = 2'-O-methyl modified nucleotide
  modified_base 75: mod_base = OTHER; note = 2'-O-methyl modified nucleotide
  modified_base 76: mod_base = OTHER; note = 2'-O-methyl modified nucleotide
  modified_base 77: mod_base = OTHER; note = 2'-O-methyl modified nucleotide
  modified_base 78: mod_base = OTHER; note = 2'-O-methyl modified nucleotide
  modified_base 79: mod_base = OTHER; note = 2'-O-methyl modified nucleotide
  modified_base 80: mod_base = OTHER; note = 2'-O-methyl modified nucleotide
  modified_base 81: mod_base = OTHER; note = 2'-O-methyl modified nucleotide
  modified_base 82: mod_base = OTHER; note = 2'-O-methyl modified nucleotide
  modified_base 83: mod_base = OTHER; note = 2'-O-methyl modified nucleotide
  modified_base 84: mod_base = OTHER; note = 2'-O-methyl modified nucleotide
  modified_base 85: mod_base = OTHER; note = 2'-O-methyl modified nucleotide
  modified_base 86: mod_base = OTHER; note = 2'-O-methyl modified nucleotide
  modified_base 87: mod_base = OTHER; note = 2'-O-methyl modified nucleotide
  modified_base 88: mod_base = OTHER; note = 2'-O-methyl modified nucleotide
  modified_base 89: mod_base = OTHER; note = 2'-O-methyl modified nucleotide
  modified_base 90: mod_base = OTHER; note = 2'-O-methyl modified nucleotide
  modified_base 91: mod_base = OTHER; note = 2'-O-methyl modified nucleotide
  modified_base 92: mod_base = OTHER; note = 2'-O-methyl modified nucleotide
  modified_base 93: mod_base = OTHER; note = 2'-O-methyl modified nucleotide
  modified_base 94: mod_base = OTHER; note = 2'-O-methyl modified nucleotide
  modified_base 95: mod_base = OTHER; note = 2'-O-methyl modified nucleotide
  modified_base 96: mod_base = OTHER; note = 2'-O-methyl modified nucleotide
  modified_base 97: mod_base = OTHER; note = 2'-O-methyl modified nucleotide with phosphorothioate linkage
  modified_base 98: mod_base = OTHER; note = 2'-O-methyl modified nucleotide with phosphorothioate linkage
  modified_base 99: mod_base = OTHER; note = 2'-O-methyl modified nucleotide with phosphorothioate linkage
  modified_base 100: mod_base = OTHER; note = 2'-O-methyl modified nucleotide
nnnnnnnnnnnnnnnnnnnngttttagagctagaaatagcaagttaaaataaggctagtccgttatcaacttcaaaaagtggcaccgagtcggtgctttt

SEQ ID NO: 753 - RNA, 11 nt, synthetic construct
  source 1..11: mol_type = other RNA
  modified_base 11: mod_base = OTHER; note = Nucleotide attached to proline
agccacgaaaa

SEQ ID NO: 754 - protein, 1294 aa, synthetic construct
  VARIANT 1294: note = Any amino acid
MARIIDEFCGQMNGYTRSITLRNRLVPIGKTEENLKQFLEKDLERATAYPDIKNLIDAIHRNVIEDTLSKVALNWNEIFNILATYQNEKDKKKKAAIKKDLEKLQSGARKKIVEAFKKNPDFEKLFKEGLFKELLPELIKSAPVDEIAVKTKALECFNRFSTYFTGFHDNRKNMYSEEAKSTAISYRIVNENFPKFFANIKLFNYLKEHFPRIIIDTEESLKDYLKGKKLDSVFSIDGFNSVLAQSGIDFYNTVIGGISGEAGTKKTQGLNEKINLARQQLSKEEKNKLRGKMVVLFKQILSDRETSSFIPVGFANKEEVYSTVKEFNNSIAEKAVSKVRDLFLHREEFTLNEIFVPAKSLTDFSQAIFGSWSILSEGLFLLEKDSMKKALSESQEEKINKEIAKKDCSFTELQLAYERYCTEHNLPVEKFCKDYFDIVDYRGNGAKSEKTKVSILSEILETFLQLDFDHIQDLQQEKNAAIPIKAYLDEVQNLYHHLKLVDYRGEEQKDSTFYSKHDEILTDLSQIVPLYNKVRNFVTKKLGESKKIKLNFDCPTLANGWDENKESSNDAIILRKDGKYYLGIYNPNNKPKFAKKDSIVGDCYEKMAYKQIALPMGLGAFVRKCFGTAQKYGWGCPENCLNSEGKIIIKDEEAKGNLEAIIDCYKDFLNKYEKDGFKYKDYNFSFLDSASYEKLSDFFNDVKPQGYKLSFTSIPLSEIDKMIDEGKLFLFQIYNKDFAKKATGKKNLHTLYWENLFSVENLQDVVLKLNGEAELFWREASIKKDKVIVHKKGSILVNRTTTDGKSIPEAIYQEIYQLKNKMADSISDEAKRLLESGTVVCKVATHDIVKDKHFTENTYLFHCPITMNFKAKDRTNKEFNNHVLEVLNKNPDIKVIGLDRGERHLLYLSLINQKGEIECQKTLNLVEQVRNDKTVSVNYHEKLVHKEGSRDAARKNWQTIGNIKELKEGYLSAVVHEIASLMVKHNAIVVMEDLNFGFKRGRFAVERQIYQKFENMLIEKLNYLVFKDRKVTEPGGVLNAYQLANKSAKVTDVYKQCGWLFYIPAAYTSKIDPRTGFANLFITKGLTNVEKKKEFFGKFDSIRYDATESCFVFSFDYAKICDNADYKKKWDVYTRGTRLVYNKTERKNVSVNPTEELQCVFDEFGIKWNTGEDLIESISLIPAEKSNAKFFDVLLRMFNATLQMRNSVPNTDTDYLVSPVKAEDGSFFDSREEFKKGGDARLPIDCDANGAYHIALKGLYLLLNDFNRDNKGVIQNISNKDWFKFVQEKVYKDX

SEQ ID NO: 755 - protein, 1294 aa, synthetic construct
  VARIANT 1294: note = Any amino acid
MARIIDEFCGQMNGYTRSITLRNRLVPIGKTEENLKQFLEKDLERATAYPDIKNLIDAIHRNVIEDTLSKVALNWNEIFNILATYQNEKDKKKKAAIKKDLEKLQSGARKKIVEAFKKNPDFEKLFKEGLFKELLPELIKSAPVDEIAVKTKALECFNRFSTYFTGFHDNRKNMYSEEAKSTAISYRIVNENFPKFFANIKLFNYLKEHFPRIIIDTEESLKDYLKGKKLDSVFSIDGFNSVLAQSGIDFYNTVIGGISGEAGTKKTQGLNEKINLARQQLSKEEKNKLRGKMVVLFKQILSDRETSSFIPVGFANKEEVYSTVKEFNNSIAEKAVSKVRDLFLHREEFTLNEIFVPAKSLTDFSQAIFGSWSILSEGLFLLEKDSMKKALSESQEEKINKEIAKKDCSFTELQLAYERYCTEHNLPVEKFCKDYFDIVDYRGNGAKSEKTKVSILSEILETFLQLDFDHIQDLQQEKNAAIPIKAYLDEVQNLYHHLKLVDYRGEEQKDSTFYSKHDEILTDLSQIVPLYNKVRNFVTKKLGESKKIKLNFDCPTLANGWDENQESSNDAIILRKDGKYYLGIYNPINKPKFAKKDSIVGDCYEKMAYKQIALPMGLGAFVRKCFGTAQKYGWGCPENCLNSEGKIIIKDEEAKGNLEAIIDCYKDFLNKYEKDGFKYKDYNFSFLDSASYEKLSDFFNDVKPQGYKLSFTSIPLSEIDKMIDEGKLFLFQIYNKDFAKKATGKKNLHTLYWENLFSVENLQDVVLKLNGEAELFWREASIKKDKVIVHKKGSILVNRTTTDGKSIPEAIYQEIYQLKNKMADSISDEAKRLLESGTVVCKVATHDIVKDKHFTENTYLFHCPITMNFKAKDRTNKEFNNHVLEVLNKNPDIKVIGLDRGERHLLYLSLINQKGEIECQKTLNLVEQVRNDKTVSVNYHEKLVHKEGSRDAARKNWQTIGNIKELKEGYLSAVVHEIASLMVKHNAIVVMEDLNFGFKRGRFAVERQIYQKFENMLIEKLNYLVFKDRKVTEPGGVLNAYQLANKSAKVTDVYKQCGWLFYIPAAYTSKIDPRTGFANLFITKGLTNVEKKKEFFGKFDSIRYDATESCFVFSFDYAKICDNADYKKKWDVYTRGTRLVYNKTERKNVSVNPTEELQCVFDEFGIKWNTGEDLIESISLIPAEKSNAKFFDVLLRMFNATLQMRNSVPNTDTDYLVSPVKAEDGSFFDSREEFKKGGDARLPIDCDANGAYHIALKGLYLLLNDFNRDNKGVIQNISNKDWFKFVQEKVYKDX

SEQ ID NO: 756 - protein, 1294 aa, synthetic construct
  VARIANT 1294: note = Any amino acid
MARIIDEFCGQMNGYTRSITLRNRLVPIGKTEENLKQFLEKDLERATAYPDIKNLIDAIHRNVIEDTLSKVALNWNEIFNILATYQNEKDKKKKAAIKKDLEKLQSGARKKIVEAFKKNPDFEKLFKEGLFKELLPELIKSAPVDEIAVKTKALECFNRFSTYFTGFHDNRKNMYSEEAKSTAISYRIVNENFPKFFANIKLFNYLKEHFPRIIIDTEESLKDYLKGKKLDSVFSIDGFNSVLAQSGIDFYNTVIGGISGEAGTKKTQGLNEKINLARQQLSKEEKNKLRGKMVVLFKQILSDRETSSFIPVGFANKEEVYSTVKEFNNSIAEKAVSKVRDLFLHREEFTLNEIFVPAKSLTDFSQAIFGSWSILSEGLFLLEKDSMKKALSESQEEKINKEIAKKDCSFTELQLAYERYCTEHNLPVEKFCKDYFDIVDYRGNGAKSEKTKVSILSEILETFLQLDFDHIQDLQQEKNAAIPIKAYLDEVQNLYHHLKLVDYRGEEQKDSTFYSKHDEILTDLSQIVPLYNKVRNFVTKKLGESKKIKLNFDCPTLANGWDENQESSNDAIILRKDGKYYLGSYNPNNKPKFAKKDSIVGDCYEKMAYKQIALPMGLGAFVRKCFGTAQKYGWGCPENCLNSEGKIIIKDEEAKGNLEAIIDCYKDFLNKYEKDGFKYKDYNFSFLDSASYEKLSDFFNDVKPQGYKLSFTSIPLSEIDKMIDEGKLFLFQIYNKDFAKKATGKKNLHTLYWENLFSVENLQDVVLKLNGEAELFWREASIKKDKVIVHKKGSILVNRTTTDGKSIPEAIYQEIYQLKNKMADSISDEAKRLLESGTVVCKVATHDIVKDKHFTENTYLFHCPITMNFKAKDRTNKEFNNHVLEVLNKNPDIKVIGLDRGERHLLYLSLINQKGEIECQKTLNLVEQVRNDKTVSVNYHEKLVHKEGSRDAARKNWQTIGNIKELKEGYLSAVVHEIASLMVKHNAIVVMEDLNFGFKRGRFAVERQIYQKFENMLIEKLNYLVFKDRKVTEPGGVLNAYQLANKSAKVTDVYKQCGWLFYIPAAYTSKIDPRTGFANLFITKGLTNVEKKKEFFGKFDSIRYDATESCFVFSFDYAKICDNADYKKKWDVYTRGTRLVYNKTERKNVSVNPTEELQCVFDEFGIKWNTGEDLIESISLIPAEKSNAKFFDVLLRMFNATLQMRNSVPNTDTDYLVSPVKAEDGSFFDSREEFKKGGDARLPIDCDANGAYHIALKGLYLLLNDFNRDNKGVIQNISNKDWFKFVQEKVYKDX

SEQ ID NO: 757 - protein, 1294 aa, synthetic construct
  VARIANT 1294: note = Any amino acid
MARIIDEFCGQMNGYTRSITLRNRLVPIGKTEENLKQFLEKDLERATAYPDIKNLIDAIHRNVIEDTLSKVALNWNEIFNILATYQNEKDKKKKAAIKKDLEKLQSGARKKIVEAFKKNPDFEKLFKEGLFKELLPELIKSAPVDEIAVKTKALECFNRFSTYFTGFHDNRKNMYSEEAKSTAISYRIVNENFPKFFANIKLFNYLKEHFPRIIIDTEESLKDYLKGKKLDSVFSIDGFNSVLAQSGIDFYNTVIGGISGEAGTKKTQGLNEKINLARQQLSKEEKNKLRGKMVVLFKQILSDRETSSFIPVGFANKEEVYSTVKEFNNSIAEKAVSKVRDLFLHREEFTLNEIFVPAKSLTDFSQAIFGSWSILSEGLFLLEKDSMKKALSESQEEKINKEIAKKDCSFTELQLAYERYCTEHNLPVEKFCKDYFDIVDYRGNGAKSEKTKESILSEILETFLQLDFDHIQDLQQEKNAAIPIKAYLDEVQNLYHHLKLVDYRGEEQKDSTFYSKHDEILTDLSQIVPLYNKVRNFVTKKLGESKKIKLNFDCPTLANGWDENQESSNDAIILRKDGKYYLGIYNPNNKPKFAKKDSIVGDCYEKMAYKQIALPMGLGAFVRKCFGTAQKYGWGCPENCLNSEGKIIIKDEEAKGNLEAIIDCYKDFLNKYEKDGFKYKDYNFSFLDSASYEKLSDFFNDVKPQGYKLSFTSIPLSEIDKMIDEGKLFLFQIYNKDFAKKATGKKNLHTLYWENLFSVENLQDVVLKLNGEAELFWREASIKKDKVIVHKKGSILVNRTTTDGKSIPEAIYQEIYQLKNKMADSISDEAKRLLESGTVVCKVATHDIVKDKHFTENTYLFHCPITMNFKAKDRTNKEFNNHVLEVLNKNPDIKVIGLDRGERHLLYLSLINQKGEIECQKTLNLVEQVRNDKTVSVNYHEKLVHKEGSRDAARKNWQTIGNIKELKEGYLSAVVHEIASLMVKHNAIVVMEDLNFGFKRGRFAVERQIYQKFENMLIEKLNYLVFKDRKVTEPGGVLNAYQLANKSAKVTDVYKQCGWLFYIPAAYTSKIDPRTGFANLFITKGLTNVEKKKEFFGKFDSIRYDATESCFVFSFDYAKICDNADYKKKWDVYTRGTRLVYNKTERKNVSVNPTEELQCVFDEFGIKWNTGEDLIESISLIPAEKSNAKFFDVLLRMFNATLQMRNSVPNTDTDYLVSPVKAEDGSFFDSREEFKKGGDARLPIDCDANGAYHIALKGLYLLLNDFNRDNKGVIQNISNKDWFKFVQEKVYKDX

SEQ ID NO: 758 - protein, 1294 aa, synthetic construct
  VARIANT 1294: note = Any amino acid
MARIIDEFCGQMNGYTRSITLRNRLVPIGKTEENLKQFLEKDLERATAYPDIKNLIDAIHRNVIEDTLSKVALNWNEIFNILATYQNEKDKKKKAAIKKDLEKLQSGARKKIVEAFKKNPDFEKLFKEGLFKELLPELIKSAPVDEIAVKTKALECFNRFSTYFTGFHDNRKNMYSEEAKSTAISYRIVNENFPKFFANIKLFNYLKEHFPRIIIDTEESLKDYLKGKKLDSVFSIDGFNSVLAQSGIDFYNTVIGGISGEAGTKKTQGLNEKINLARQQLSKEEKNKLRGKMVVLFKQILSDRETSSFIPVGFANKEEVYSTVKEFNNSIAEKAVSKVRDLFLHREEFTLNEIFVPAKSLTDFSQAIFGSWSILSEGLFLLEKDSMKKALSESQEEKINKEIAKKDCSFTELQLAYERYCTEHNLPVEKFCKDYFDIVDYRGNGAKSEKTKVSILSEILETFLQLDFDHIQDLHQEKNAAIPIKAYLDEVQNLYHHLKLVDYRGEEQKDSTFYSKHDEILTDLSQIVPLYNKVRNFVTKKLGESKKIKLNFDCPTLANGWDENQESSNDAIILRKDGKYYLGIYNPNNKPKFAKKDSIVGDCYEKMAYKQIALPMGLGAFVRKCFGTAQKYGWGCPENCLNSEGKIIIKDEEAKGNLEAIIDCYKDFLNKYEKDGFKYKDYNFSFLDSASYEKLSDFFNDVKPQGYKLSFTSIPLSEIDKMIDEGKLFLFQIYNKDFAKKATGKKNLHTLYWENLFSVENLQDVVLKLNGEAELFWREASIKKDKVIVHKKGSILVNRTTTDGKSIPEAIYQEIYQLKNKMADSISDEAKRLLESGTVVCKVATHDIVKDKHFTENTYLFHCPITMNFKAKDRTNKEFNNHVLEVLNKNPDIKVIGLDRGERHLLYLSLINQKGEIECQKTLNLVEQVRNDKTVSVNYHEKLVHKEGSRDAARKNWQTIGNIKELKEGYLSAVVHEIASLMVKHNAIVVMEDLNFGFKRGRFAVERQIYQKFENMLIEKLNYLVFKDRKVTEPGGVLNAYQLANKSAKVTDVYKQCGWLFYIPAAYTSKIDPRTGFANLFITKGLTNVEKKKEFFGKFDSIRYDATESCFVFSFDYAKICDNADYKKKWDVYTRGTRLVYNKTERKNVSVNPTEELQCVFDEFGIKWNTGEDLIESISLIPAEKSNAKFFDVLLRMFNATLQMRNSVPNTDTDYLVSPVKAEDGSFFDSREEFKKGGDARLPIDCDANGAYHIALKGLYLLLNDFNRDNKGVIQNISNKDWFKFVQEKVYKDX

SEQ ID NO: 759 - protein, 1294 aa, synthetic construct
  VARIANT 1294: note = Any amino acid
MARIIDEFCGQMNGYTRSITLRNRLVPIGKTEENLKQFLEKDLERATAYPDIKNLIDAIHRNVIEDTLSKVALNWNEIFNILATYQNEKDKKKKAAIKKDLEKLQSGARKKIVEAFKKNPDFEKLFKEGLFKELLPELIKSAPVDEIAVKTKALECFNRFSTYFTGFHDNRKNMYSEEAKSTAISYRIVNENFPKFFANIKLFNYLKEHFPRIIIDTEESLKDYLKGKKLDSVFSIDGFNSVLAQSGIDFYNTVIGGISGEAGTKKTQGLNEKINLARQQLSKEEKNKLRGKMVVLFKQILSDRETSSFIPVGFANKEEVYSTVKEFNNSIAEKAVSKVRDLFLHREEFTLNEIFVPAKSLTDFSQAIFGSWSILSEGLFLLEKDSMKKALSESQEEKISKEIAKKDCSFTELQLAYERYCTEHNLPVEKFCKDYFDIVDYRGNGAKSEKTKVSILSEILETFLQLDFDHIQDLQQEKNAAIPIKAYLDEVQNLYHHLKLVDYRGEEQKDSTFYSKHDEILTDLSQIVPLYNKVRNFVTKKLGESKKIKLNFDCPTLANGWDENQESSNDAIILRKDGKYYLGIYNPNNKPKFAKKDSIVGDCYEKMAYKQIALPMGLGAFVRKCFGTAQKYGWGCPENCLNSEGKIIIKDEEAKGNLEAIIDCYKDFLNKYEKDGFKYKDYNFSFLDSASYEKLSDFFNDVKPQGYKLSFTSIPLSEIDKMIDEGKLFLFQIYNKDFAKKATGKKNLHTLYWENLFSVENLQDVVLKLNGEAELFWREASIKKDKVIVHKKGSILVNRTTTDGKSIPEAIYQEIYQLKNKMADSISDEAKRLLESGTVVCKVATHDIVKDKHFTENTYLFHCPITMNFKAKDRTNKEFNNHVLEVLNKNPDIKVIGLDRGERHLLYLSLINQKGEIECQKTLNLVEQVRNDKTVSVNYHEKLVHKEGSRDAARKNWQTIGNIKELKEGYLSAVVHEIASLMVKHNAIVVMEDLNFGFKRGRFAVERQIYQKFENMLIEKLNYLVFKDRKVTEPGGVLNAYQLANKSAKVTDVYKQCGWLFYIPAAYTSKIDPRTGFANLFITKGLTNVEKKKEFFGKFDSIRYDATESCFVFSFDYAKICDNADYKKKWDVYTRGTRLVYNKTERKNVSVNPTEELQCVFDEFGIKWNTGEDLIESISLIPAEKSNAKFFDVLLRMFNATLQMRNSVPNTDTDYLVSPVKAEDGSFFDSREEFKKGGDARLPIDCDANGAYHIALKGLYLLLNDFNRDNKGVIQNISNKDWFKFVQEKVYKDX

SEQ ID NO: 760 - protein, 1294 aa, synthetic construct
  VARIANT 1294: note = Any amino acid
MARIIDEFCGQMNGYTRSITLRNRLVPIGKTEENLKQFLEKDLERATAYPDIKNLIDAIHRNVIEDTLSKVALNWNEIFNILATYQNEKDKKKKAAIKKDLEKLQSGARKKIVEAFKKNPDFEKLFKEGLFKELLPELIKSAPVDEIAVKTKALECFNRFSTYFTGFHDNRKNMYSEEAKSTAISYRIVNENFPKFFANIKLFNYLKEHFPRIIIDTEESLKDYLKGKKLDSVFSIDGFNSVLAQSGIDFYNTVIGGISGEAGTKKTQGLNEKINLARQQLSKEEKNKLRGKMVVLFKQILSDRETSSFIPVGFANKEEVYSTVKEFNNSIAEKAVSKVRDLFLHREEFTLNEIFVPAKSLTDFSQAIFGSWSILSEGLFLLEKDSMKKALSESQEEKINKEIAKKDCSFTELQLAYERYCTEHNLPVEKFCKDYFDIVDYRGNGAKSEKTKVSILSEILETFLQLDFDHNQDLQQEKNAAIPIKAYLDEVQNLYHHLKLVDYRGEEQKDSTFYSKHDEILTDLSQIVPLYNKVRNFVTKKLGESKKIKLNFDCPTLANGWDENQESSNDAIILRKDGKYYLGIYNPNNKPKFAKKDSIVGDCYEKMAYKQIALPMGLGAFVRKCFGTAQKYGWGCPENCLNSEGKIIIKDEEAKGNLEAIIDCYKDFLNKYEKDGFKYKDYNFSFLDSASYEKLSDFFNDVKPQGYKLSFTSIPLSEIDKMIDEGKLFLFQIYNKDFAKKATGKKNLHTLYWENLFSVENLQDVVLKLNGEAELFWREASIKKDKVIVHKKGSILVNRTTTDGKSIPEAIYQEIYQLKNKMADSISDEAKRLLESGTVVCKVATHDIVKDKHFTENTYLFHCPITMNFKAKDRTNKEFNNHVLEVLNKNPDIKVIGLDRGERHLLYLSLINQKGEIECQKTLNLVEQVRNDKTVSVNYHEKLVHKEGSRDAARKNWQTIGNIKELKEGYLSAVVHEIASLMVKHNAIVVMEDLNFGFKRGRFAVERQIYQKFENMLIEKLNYLVFKDRKVTEPGGVLNAYQLANKSAKVTDVYKQCGWLFYIPAAYTSKIDPRTGFANLFITKGLTNVEKKKEFFGKFDSIRYDATESCFVFSFDYAKICDNADYKKKWDVYTRGTRLVYNKTERKNVSVNPTEELQCVFDEFGIKWNTGEDLIESISLIPAEKSNAKFFDVLLRMFNATLQMRNSVPNTDTDYLVSPVKAEDGSFFDSREEFKKGGDARLPIDCDANGAYHIALKGLYLLLNDFNRDNKGVIQNISNKDWFKFVQEKVYKDX

SEQ ID NO: 761 - protein, 1294 aa, synthetic construct
  VARIANT 1294: note = Any amino acid
MARIIDEFCGQMNGYTRSITLRNRLVPIGKTEENLKQFLEKDLERATAYPDIKNLIDAIHRNVIEDTLSKVALNWNEIFNILATYQNEKDKKKKAAIKKDLEKLQSGARKKIVEAFKKNPDFEKLFKEGLFKELLPELIKSAPVDEIAVKTKALECFNRFSTYFTGFHDNRKNMYSEEAKSTAISYRIVNENFPKFFANIKLFNYLKEHFPRIIIDTEESLKDYLKGKKLDSVFSIDGFNSVLAQSGIDFYNTVIGGISGEAGTKKTQGLNEKINLARQQLSKEEKNKLRGKMVVLFKQILSDRETSSFIPVGFANKEEVYSTVKEFNNSIAEKAVSKVRDLFLHREEFTLNEIFVPAKSLTDFSQAIFGSWSILSEGLFLLEKDSMKKALSESQEEKINKEIAKKDCSFTELQLAYERYCTEHNLPVEKFCKDYFDIVDYRGNGAKSEKTKVSILSEILETFLQLDFDHIQDLQQEKNAAIPIKAYLDEVQNLYHHLKLVDYRGEEQKDSTFYSKHDEILTDLSQIVPLYNKVRNFVTKKLGDSKKIKLNFDCPTLANGWDENQESSNDAIILRKDGKYYLGIYNPNNKPKFAKKDSIVGDCYEKMAYKQIALPMGLGAFVRKCFGTAQKYGWGCPENCLNSEGKIIIKDEEAKGNLEAIIDCYKDFLNKYEKDGFKYKDYNFSFLDSASYEKLSDFFNDVKPQGYKLSFTSIPLSEIDKMIDEGKLFLFQIYNKDFAKKATGKKNLHTLYWENLFSVENLQDVVLKLNGEAELFWREASIKKDKVIVHKKGSILVNRTTTDGKSIPEAIYQEIYQLKNKMADSISDEAKRLLESGTVVCKVATHDIVKDKHFTENTYLFHCPITMNFKAKDRTNKEFNNHVLEVLNKNPDIKVIGLDRGERHLLYLSLINQKGEIECQKTLNLVEQVRNDKTVSVNYHEKLVHKEGSRDAARKNWQTIGNIKELKEGYLSAVVHEIASLMVKHNAIVVMEDLNFGFKRGRFAVERQIYQKFENMLIEKLNYLVFKDRKVTEPGGVLNAYQLANKSAKVTDVYKQCGWLFYIPAAYTSKIDPRTGFANLFITKGLTNVEKKKEFFGKFDSIRYDATESCFVFSFDYAKICDNADYKKKWDVYTRGTRLVYNKTERKNVSVNPTEELQCVFDEFGIKWNTGEDLIESISLIPAEKSNAKFFDVLLRMFNATLQMRNSVPNTDTDYLVSPVKAEDGSFFDSREEFKKGGDARLPIDCDANGAYHIALKGLYLLLNDFNRDNKGVIQNISNKDWFKFVQEKVYKDX

SEQ ID NO: 762 - protein, 1294 aa, synthetic construct
  VARIANT 1294: note = Any amino acid
MARIIDEFCGQMNGYTRSITLRNRLVPIGKTEENLKQFLEKDLERATAYPDIKNLIDAIHRNVIEDTLSKVALNWNEIFNILATYQNEKDKKKKAAIKKDLEKLQSGARKKIVEAFKKNPDFEKLFKEGLFKELLPELIKSAPVDEIAVKTKALECFNRFSTYFTGFHDNRKNMYSEEAKSTAISYRIVNENFPKFFANIKLFNYLKEHFPRIIIDTEESLKDYLKGKKLDSVFSIDGFNSVLAQSGIDFYNTVIGGISGEAGTKKTQGLNEKINLARQQLSKEEKNKLRGKMVVLFKQILSDRETSSFIPVGFANKEEVYSTVKEFNNSIAEKAVSKVRDLFLHREEFTLNEIFVPAKSLTDFSQAIFGSWSILSEGLFLLEKDSMKKALSESQEEKINKEIAKKDCSFTELQLAYERYCTEHNLPVEKFCKDYFDIVDYRGNGAKSEKTKVSILSEILETFLQLDFDHIQDLQQEKNAAIPIKAYLDEVQNLYNHLKLVDYRGEEQKDSTFYSKHDEILTDLSQIVPLYNKVRNFVTKKLGESKKIKLNFDCPTLANGWDENQESSNDAIILRKDGKYYLGIYNPNNKPKFAKKDSIVGDCYEKMAYKQIALPMGLGAFVRKCFGTAQKYGWGCPENCLNSEGKIIIKDEEAKGNLEAIIDCYKDFLNKYEKDGFKYKDYNFSFLDSASYEKLSDFFNDVKPQGYKLSFTSIPLSEIDKMIDEGKLFLFQIYNKDFAKKATGKKNLHTLYWENLFSVENLQDVVLKLNGEAELFWREASIKKDKVIVHKKGSILVNRTTTDGKSIPEAIYQEIYQLKNKMADSISDEAKRLLESGTVVCKVATHDIVKDKHFTENTYLFHCPITMNFKAKDRTNKEFNNHVLEVLNKNPDIKVIGLDRGERHLLYLSLINQKGEIECQKTLNLVEQVRNDKTVSVNYHEKLVHKEGSRDAARKNWQTIGNIKELKEGYLSAVVHEIASLMVKHNAIVVMEDLNFGFKRGRFAVERQIYQKFENMLIEKLNYLVFKDRKVTEPGGVLNAYQLANKSAKVTDVYKQCGWLFYIPAAYTSKIDPRTGFANLFITKGLTNVEKKKEFFGKFDSIRYDATESCFVFSFDYAKICDNADYKKKWDVYTRGTRLVYNKTERKNVSVNPTEELQCVFDEFGIKWNTGEDLIESISLIPAEKSNAKFFDVLLRMFNATLQMRNSVPNTDTDYLVSPVKAEDGSFFDSREEFKKGGDARLPIDCDANGAYHIALKGLYLLLNDFNRDNKGVIQNISNKDWFKFVQEKVYKDX

SEQ ID NO: 763 - protein, 1294 aa, synthetic construct
  VARIANT 1294: note = Any amino acid
MARIIDEFCGQMNGYTRSITLRNRLVPIGKTEENLKQFLEKDLERATAYPDIKNLIDAIHRNVIEDTLSKVALNWNEIFNILATYQNEKDKKKKAAIKKDLEKLQSGARKKIVEAFKKNPDFEKLFKEGLFKELLPELIKSAPVDEIAVKTKALECFNRFSTYFTGFHDNRKNMYSEEAKSTAISYRIVNENFPKFFANIKLFNYLKEHFPRIIIDTEESLKDYLKGKKLDSVFSIDGFNSVLAQSGIDFYNTVIGGISGEAGTKKTQGLNEKINLARQQLSKEEKNKLRGKMVVLFKQILSDRETSSFIPVGFANKEEVYSTVKEFNNSIAEKAVSKVRDLFLHREEFTLNEIFVPAKSLTDFSQAIFGSWSILSEGLFLLEKDSMKKALSESQEEKINKEIAKKDCSFTELQLAYERYCTEHNLPVEKFCKDYFDIVDYRGNGAKSEKTKVSILSEILETFLQLDFDHIQDLQQEKNAAIPIKAYLDEVQNLYHHLKLVDYRGEEQKDSTFYSKHDEILTDLSQIVPLYNKFRNFVTKKLGESKKIKLNFDCPTLANGWDENQESSNDAIILRKDGKYYLGIYNPNNKPKFAKKDSIVGDCYEKMAYKQIALPMGLGAFVRKCFGTAQKYGWGCPENCLNSEGKIIIKDEEAKGNLEAIIDCYKDFLNKYEKDGFKYKDYNFSFLDSASYEKLSDFFNDVKPQGYKLSFTSIPLSEIDKMIDEGKLFLFQIYNKDFAKKATGKKNLHTLYWENLFSVENLQDVVLKLNGEAELFWREASIKKDKVIVHKKGSILVNRTTTDGKSIPEAIYQEIYQLKNKMADSISDEAKRLLESGTVVCKVATHDIVKDKHFTENTYLFHCPITMNFKAKDRTNKEFNNHVLEVLNKNPDIKVIGLDRGERHLLYLSLINQKGEIECQKTLNLVEQVRNDKTVSVNYHEKLVHKEGSRDAARKNWQTIGNIKELKEGYLSAVVHEIASLMVKHNAIVVMEDLNFGFKRGRFAVERQIYQKFENMLIEKLNYLVFKDRKVTEPGGVLNAYQLANKSAKVTDVYKQCGWLFYIPAAYTSKIDPRTGFANLFITKGLTNVEKKKEFFGKFDSIRYDATESCFVFSFDYAKICDNADYKKKWDVYTRGTRLVYNKTERKNVSVNPTEELQCVFDEFGIKWNTGEDLIESISLIPAEKSNAKFFDVLLRMFNATLQMRNSVPNTDTDYLVSPVKAEDGSFFDSREEFKKGGDARLPIDCDANGAYHIALKGLYLLLNDFNRDNKGVIQNISNKDWFKFVQEKVYKDX

SEQ ID NO: 764 - protein, 1294 aa, synthetic construct
  VARIANT 1294: note = Any amino acid
MARIIDEFCGQMNGYTRSITLRNRLVPIGKTEENLKQFLEKDLERATAYPDIKNLIDAIHRNVIEDTLSKVALNWNEIFNILATYQNEKDKKKKAAIKKDLEKLQSGARKKIVEAFKKNPDFEKLFKEGLFKELLPELIKSAPVDEIAVKTKALECFNRFSTYFTGFHDNRKNMYSEEAKSTAISYRIVNENFPKFFANIKLFNYLKEHFPRIIIDTEESLKDYLKGKKLDSVFSIDGFNSVLAQSGIDFYNTVIGGISGEAGTKKTQGLNEKINLARQQLSKEEKNKLRGKMVVLFKQILSDRETSSFIPVGFANKEEVYSTVKEFNNSIAEKAVSKVRDLFLHREEFTLNEIFVPAKSLTDFSQAIFGSWSILSEGLFLLEKDSMKKALSESQEEKINKEIAKKDCSFTELQLAYERYCTEHNLPVEKFCKDYFDIVDYRGNGAKSEKTKVSILSEILETFLQLDFDHIQDLQQEKNAAIPIKAYLDEVQNLYHHLKLVDYRGEEQKDSTFYSKHDEILTDLSQIVPLYNKVRNFVTKKLGESKKIKLNFDCPTLANGWDENQESSNDAIILRKGGKYYLGIYNPNNKPKFAKKDSIVGDCYEKMAYKQIALPMGLGAFVRKCFGTAQKYGWGCPENCLNSEGKIIIKDEEAKGNLEAIIDCYKDFLNKYEKDGFKYKDYNFSFLDSASYEKLSDFFNDVKPQGYKLSFTSIPLSEIDKMIDEGKLFLFQIYNKDFAKKATGKKNLHTLYWENLFSVENLQDVVLKLNGEAELFWREASIKKDKVIVHKKGSILVNRTTTDGKSIPEAIYQEIYQLKNKMADSISDEAKRLLESGTVVCKVATHDIVKDKHFTENTYLFHCPITMNFKAKDRTNKEFNNHVLEVLNKNPDIKVIGLDRGERHLLYLSLINQKGEIECQKTLNLVEQVRNDKTVSVNYHEKLVHKEGSRDAARKNWQTIGNIKELKEGYLSAVVHEIASLMVKHNAIVVMEDLNFGFKRGRFAVERQIYQKFENMLIEKLNYLVFKDRKVTEPGGVLNAYQLANKSAKVTDVYKQCGWLFYIPAAYTSKIDPRTGFANLFITKGLTNVEKKKEFFGKFDSIRYDATESCFVFSFDYAKICDNADYKKKWDVYTRGTRLVYNKTERKNVSVNPTEELQCVFDEFGIKWNTGEDLIESISLIPAEKSNAKFFDVLLRMFNATLQMRNSVPNTDTDYLVSPVKAEDGSFFDSREEFKKGGDARLPIDCDANGAYHIALKGLYLLLNDFNRDNKGVIQNISNKDWFKFVQEKVYKDX

SEQ ID NO: 765 - protein, 1294 aa, synthetic construct
  VARIANT 1294: note = Any amino acid
MARIIDEFCGQMNGYTRSITLRNRLVPIGKTEENLKQFLEKDLERATAYPDIKNLIDAIHRNVIEDTLSKVALNWNEIFNILATYQNEKDKKKKAAIKKDLEKLQSGARKKIVEAFKKNPDFEKLFKEGLFKELLPELIKSAPVDEIAVKTKALECFNRFSTYFTGFHDNRKNMYSEEAKSTAISYRIVNENFPKFFANIKLFNYLKEHFPRIIIDTEESLKDYLKGKKLDSVFSIDGFNSVLAQSGIDFYNTVIGGISGEAGTKKTQGLNEKINLARQQLSKEEKNKLRGKMVVLFKQILSDRETSSFIPVGFANKEEVYSTVKEFNNSIAEKAVSKVRDLFLHREEFTLNEIFVPAKSLTDFSQAIFGSWSILSEGLFLLEKDSMKKALSESQEEKINMEIAKKDCSFTELQLAYERYCTEHNLPVEKFCKDYFDIVDYRGNGAKSEKTKVSILSEILETFLQLDFDHIQDLQQEKNAAIPIKAYLDEVQNLYHHLKLVDYRGEEQKDSTFYSKHDEILTDLSQIVPLYNKVRNFVTKKLGESKKIKLNFDCPTLANGWDENQESSNDAIILRKDGKYYLGIYNPNNKPKFAKKDSIVGDCYEKMAYKQIALPMGLGAFVRKCFGTAQKYGWGCPENCLNSEGKIIIKDEEAKGNLEAIIDCYKDFLNKYEKDGFKYKDYNFSFLDSASYEKLSDFFNDVKPQGYKLSFTSIPLSEIDKMIDEGKLFLFQIYNKDFAKKATGKKNLHTLYWENLFSVENLQDVVLKLNGEAELFWREASIKKDKVIVHKKGSILVNRTTTDGKSIPEAIYQEIYQLKNKMADSISDEAKRLLESGTVVCKVATHDIVKDKHFTENTYLFHCPITMNFKAKDRTNKEFNNHVLEVLNKNPDIKVIGLDRGERHLLYLSLINQKGEIECQKTLNLVEQVRNDKTVSVNYHEKLVHKEGSRDAARKNWQTIGNIKELKEGYLSAVVHEIASLMVKHNAIVVMEDLNFGFKRGRFAVERQIYQKFENMLIEKLNYLVFKDRKVTEPGGVLNAYQLANKSAKVTDVYKQCGWLFYIPAAYTSKIDPRTGFANLFITKGLTNVEKKKEFFGKFDSIRYDATESCFVFSFDYAKICDNADYKKKWDVYTRGTRLVYNKTERKNVSVNPTEELQCVFDEFGIKWNTGEDLIESISLIPAEKSNAKFFDVLLRMFNATLQMRNSVPNTDTDYLVSPVKAEDGSFFDSREEFKKGGDARLPIDCDANGAYHIALKGLYLLLNDFNRDNKGVIQNISNKDWFKFVQEKVYKDX

SEQ ID NO: 766 - protein, 1294 aa, synthetic construct
  VARIANT 1294: note = Any amino acid
MARIIDEFCGQMNGYTRSITLRNRLVPIGKTEENLKQFLEKDLERATAYPDIKNLIDAIHRNVIEDTLSKVALNWNEIFNILATYQNEKDKKKKAAIKKDLEKLQSGARKKIVEAFKKNPDFEKLFKEGLFKELLPELIKSAPVDEIAVKTKALECFNRFSTYFTGFHDNRKNMYSEEAKSTAISYRIVNENFPKFFANIKLFNYLKEHFPRIIIDTEESLKDYLKGKKLDSVFSIDGFNSVLAQSGIDFYNTVIGGISGEAGTKKTQGLNEKINLARQQLSKEEKNKLRGKMVVLFKQILSDRETSSFIPVGFANKEEVYSTVKEFNNSIAEKAVSKVRDLFLHREEFTLNEIFVPAKSLTDFSQAIFGSWSILSEGLFLLEKDSMKKALSESQEEKINKEIAKKDCSFTELQLAYERYCTEHNLPVEKFCKDYFDIVDYRGNGAKSEKTKVSILSEILETFLQLDFDHIQDLQQEKNAAIPIKAYLDEVQNLYHHLKLVDYRGEEQKDSTFYSKHDEILTDLSQIVPLYNKVRNFVTKKLGESKKIELNFDCPTLANGWDENQESSNDAIILRKDGKYYLGIYNPNNKPKFAKKDSIVGDCYEKMAYKQIALPMGLGAFVRKCFGTAQKYGWGCPENCLNSEGKIIIKDEEAKGNLEAIIDCYKDFLNKYEKDGFKYKDYNFSFLDSASYEKLSDFFNDVKPQGYKLSFTSIPLSEIDKMIDEGKLFLFQIYNKDFAKKATGKKNLHTLYWENLFSVENLQDVVLKLNGEAELFWREASIKKDKVIVHKKGSILVNRTTTDGKSIPEAIYQEIYQLKNKMADSISDEAKRLLESGTVVCKVATHDIVKDKHFTENTYLFHCPITMNFKAKDRTNKEFNNHVLEVLNKNPDIKVIGLDRGERHLLYLSLINQKGEIECQKTLNLVEQVRNDKTVSVNYHEKLVHKEGSRDAARKNWQTIGNIKELKEGYLSAVVHEIASLMVKHNAIVVMEDLNFGFKRGRFAVERQIYQKFENMLIEKLNYLVFKDRKVTEPGGVLNAYQLANKSAKVTDVYKQCGWLFYIPAAYTSKIDPRTGFANLFITKGLTNVEKKKEFFGKFDSIRYDATESCFVFSFDYAKICDNADYKKKWDVYTRGTRLVYNKTERKNVSVNPTEELQCVFDEFGIKWNTGEDLIESISLIPAEKSNAKFFDVLLRMFNATLQMRNSVPNTDTDYLVSPVKAEDGSFFDSREEFKKGGDARLPIDCDANGAYHIALKGLYLLLNDFNRDNKGVIQNISNKDWFKFVQEKVYKDX

SEQ ID NO: 767 - protein, 1294 aa, synthetic construct
  VARIANT 1294: note = Any amino acid
MARIIDEFCGQMNGYTRSITLRNRLVPIGKTEENLKQFLEKDLERATAYPDIKNLIDAIHRNVIEDTLSKVALNWNEIFNILATYQNEKDKKKKAAIKKDLEKLQSGARKKIVEAFKKNPDFEKLFKEGLFKELLPELIKSAPVDEIAVKTKALECFNRFSTYFTGFHDNRKNMYSEEAKSTAISYRIVNENFPKFFANIKLFNYLKEHFPRIIIDTEESLKDYLKGKKLDSVFSIDGFNSVLAQSGIDFYNTVIGGISGEAGTKKTQGLNEKINLARQQLSKEEKNKLRGKMVVLFKQILSDRETSSFIPVGFANKEEVYSTVKEFNNSIAEKAVSKVRDLFLHREEFTLNEIFVPAKSLTDFSQAIFGSWSILSEGLFLLEKDSMKKALSESQEEKINKEIAKKDCSFTELQLAYERYCTEHNLPVEKFCKDYFDIVDYRGNGAKSEKTKVSILSEILETFLQLDFDHIQDLQQEKNAAIPIKAYLDEVQNLYHHLKLVDYRGEEQKDSTFYSKHDEILTDLSQIVPLYNKVRNFVTKKLGESKKIKLNFDCPTLANGWDENQESSNDAIILRKDGIYYLGIYNPNNKPKFAKKDSIVGDCYEKMAYKQIALPMGLGAFVRKCFGTAQKYGWGCPENCLNSEGKIIIKDEEAKGNLEAIIDCYKDFLNKYEKDGFKYKDYNFSFLDSASYEKLSDFFNDVKPQGYKLSFTSIPLSEIDKMIDEGKLFLFQIYNKDFAKKATGKKNLHTLYWENLFSVENLQDVVLKLNGEAELFWREASIKKDKVIVHKKGSILVNRTTTDGKSIPEAIYQEIYQLKNKMADSISDEAKRLLESGTVVCKVATHDIVKDKHFTENTYLFHCPITMNFKAKDRTNKEFNNHVLEVLNKNPDIKVIGLDRGERHLLYLSLINQKGEIECQKTLNLVEQVRNDKTVSVNYHEKLVHKEGSRDAARKNWQTIGNIKELKEGYLSAVVHEIASLMVKHNAIVVMEDLNFGFKRGRFAVERQIYQKFENMLIEKLNYLVFKDRKVTEPGGVLNAYQLANKSAKVTDVYKQCGWLFYIPAAYTSKIDPRTGFANLFITKGLTNVEKKKEFFGKFDSIRYDATESCFVFSFDYAKICDNADYKKKWDVYTRGTRLVYNKTERKNVSVNPTEELQCVFDEFGIKWNTGEDLIESISLIPAEKSNAKFFDVLLRMFNATLQMRNSVPNTDTDYLVSPVKAEDGSFFDSREEFKKGGDARLPIDCDANGAYHIALKGLYLLLNDFNRDNKGVIQNISNKDWFKFVQEKVYKDX

SEQ ID NO: 768 - protein, 1294 aa, synthetic construct
  VARIANT 1294: note = Any amino acid
MARIIDEFCGQMNGYTRSITLRNRLVPIGKTEENLKQFLEKDLERATAYPDIKNLIDAIHRNVIEDTLSKVALNWNEIFNILATYQNEKDKKKKAAIKKDLEKLQSGARKKIVEAFKKNPDFEKLFKEGLFKELLPELIKSAPVDEIAVKTKALECFNRFSTYFTGFHDNRKNMYSEEAKSTAISYRIVNENFPKFFANIKLFNYLKEHFPRIIIDTEESLKDYLKGKKLDSVFSIDGFNSVLAQSGIDFYNTVIGGISGEAGTKKTQGLNEKINLARQQLSKEEKNKLRGKMVVLFKQILSDRETSSFIPVGFANKEEVYSTVKEFNNSIAEKAVSKVRDLFLHREEFTLNEIFVPAKSLTDFSQAIFGSWSILSEGLFLLEKDSMKKALSESQEEKINKEIAKKDCSFTELQLAYERYCTEHNLPVEKFCKDYFDIVDYRGNGAKSEKTKVSILSEILETFLQLDFDHIQDLQQEKNAAIPIKAYLDEVQNLYHHLKLVDYRGEEQEDSTFYSKHDEILTDLSQIVPLYNKVRNFVTKKLGESKKIKLNFDCPTLANGWDENQESSNDAIILRKDGKYYLGIYNPNNKPKFAKKDSIVGDCYEKMAYKQIALPMGLGAFVRKCFGTAQKYGWGCPENCLNSEGKIIIKDEEAKGNLEAIIDCYKDFLNKYEKDGFKYKDYNFSFLDSASYEKLSDFFNDVKPQGYKLSFTSIPLSEIDKMIDEGKLFLFQIYNKDFAKKATGKKNLHTLYWENLFSVENLQDVVLKLNGEAELFWREASIKKDKVIVHKKGSILVNRTTTDGKSIPEAIYQEIYQLKNKMADSISDEAKRLLESGTVVCKVATHDIVKDKHFTENTYLFHCPITMNFKAKDRTNKEFNNHVLEVLNKNPDIKVIGLDRGERHLLYLSLINQKGEIECQKTLNLVEQVRNDKTVSVNYHEKLVHKEGSRDAARKNWQTIGNIKELKEGYLSAVVHEIASLMVKHNAIVVMEDLNFGFKRGRFAVERQIYQKFENMLIEKLNYLVFKDRKVTEPGGVLNAYQLANKSAKVTDVYKQCGWLFYIPAAYTSKIDPRTGFANLFITKGLTNVEKKKEFFGKFDSIRYDATESCFVFSFDYAKICDNADYKKKWDVYTRGTRLVYNKTERKNVSVNPTEELQCVFDEFGIKWNTGEDLIESISLIPAEKSNAKFFDVLLRMFNATLQMRNSVPNTDTDYLVSPVKAEDGSFFDSREEFKKGGDARLPIDCDANGAYHIALKGLYLLLNDFNRDNKGVIQNISNKDWFKFVQEKVYKDX

SEQ ID NO: 769 - protein, 1294 aa, synthetic construct
  VARIANT 1294: note = Any amino acid
MARIIDEFCGQMNGYTRSITLRNRLVPIGKTEENLKQFLEKDLERATAYPDIKNLIDAIHRNVIEDTLSKVALNWNEIFNILATYQNEKDKKKKAAIKKDLEKLQSGARKKIVEAFKKNPDFEKLFKEGLFKELLPELIKSAPVDEIAVKTKALECFNRFSTYFTGFHDNRKNMYSEEAKSTAISYRIVNENFPKFFANIKLFNYLKEHFPRIIIDTEESLKDYLKGKKLDSVFSIDGFNSVLAQSGIDFYNTVIGGISGEAGTKKTQGLNEKINLARQQLSKEEKNKLRGKMVVLFKQILSDRETSSFIPVGFANKEEVYSTVKEFNNSIAEKAVSKVRDLFLHREEFTLNEIFVPAKSLTDFSQAIFGSWSILSEGLFLLEKDSMKKALSESQEEKINKEIAKKDCSFTELQLAYERYCTEHNLPVEKFCKDYFDIVDYRGNGAKSEKTKVSILSEILETFLQLDFDHIQDLQQEKNAAIPIKAYLDEVQNLYHHLKLVDYRGEEQKDSTFYSKHDEILTDLSQIVPLYNKVRNFVTKKLGESKKIKLNFDCPTLANGWDENQESSNDAIILRKDGKYYLGIYNPNNKPKFATKDSIVGDCYEKMAYKQIALPMGLGAFVRKCFGTAQKYGWGCPENCLNSEGKIIIKDEEAKGNLEAIIDCYKDFLNKYEKDGFKYKDYNFSFLDSASYEKLSDFFNDVKPQGYKLSFTSIPLSEIDKMIDEGKLFLFQIYNKDFAKKATGKKNLHTLYWENLFSVENLQDVVLKLNGEAELFWREASIKKDKVIVHKKGSILVNRTTTDGKSIPEAIYQEIYQLKNKMADSISDEAKRLLESGTVVCKVATHDIVKDKHFTENTYLFHCPITMNFKAKDRTNKEFNNHVLEVLNKNPDIKVIGLDRGERHLLYLSLINQKGEIECQKTLNLVEQVRNDKTVSVNYHEKLVHKEGSRDAARKNWQTIGNIKELKEGYLSAVVHEIASLMVKHNAIVVMEDLNFGFKRGRFAVERQIYQKFENMLIEKLNYLVFKDRKVTEPGGVLNAYQLANKSAKVTDVYKQCGWLFYIPAAYTSKIDPRTGFANLFITKGLTNVEKKKEFFGKFDSIRYDATESCFVFSFDYAKICDNADYKKKWDVYTRGTRLVYNKTERKNVSVNPTEELQCVFDEFGIKWNTGEDLIESISLIPAEKSNAKFFDVLLRMFNATLQMRNSVPNTDTDYLVSPVKAEDGSFFDSREEFKKGGDARLPIDCDANGAYHIALKGLYLLLNDFNRDNKGVIQNISNKDWFKFVQEKVYKDX

SEQ ID NO: 770 - protein, 1294 aa, synthetic construct
  VARIANT 1294: note = Any amino acid
MARIIDEFCGQMNGYTRSITLRNRLVPIGKTEENLKQFLEKDLERATAYPDIKNLIDAIHRNVIEDTLSKVALNWNEIFNILATYQNEKDKKKKAAIKKDLEKLQSGARKKIVEAFKKNPDFEKLFKEGLFKELLPELIKSAPVDEIAVKTKALECFNRFSTYFTGFHDNRKNMYSEEAKSTAISYRIVNENFPKFFANIKLFNYLKEHFPRIIIDTEESLKDYLKGKKLDSVFSIDGFNSVLAQSGIDFYNTVIGGISGEAGTKKTQGLNEKINLARQQLSKEEKNKLRGKMVVLFKQILSDRETSSFIPVGFANKEEVYSTVKEFNNSIAEKAVSKVRDLFLHREEFTLNEIFVPAKSLTDFSQAIFGSWSILSEGLFLLEKDSMKKALSESQEEKINKEIAKKDCSFTELQLAYERYCTEHNLPVEKFCKDYFDIVDYRGNGAKSEKTKVSILSEILETFLQLDFDHIQDLQQEKNAAIPIKAYLDEVQNLYHHLKLDDYRGEEQKDSTFYSKHDEILTDLSQIVPLYNKVRNFVTKKLGESKKIKLNFDCPTLANGWDENQESSNDAIILRKDGKYYLGIYNPNNKPKFAKKDSIVGDCYEKMAYKQIALPMGLGAFVRKCFGTAQKYGWGCPENCLNSEGKIIIKDEEAKGNLEAIIDCYKDFLNKYEKDGFKYKDYNFSFLDSASYEKLSDFFNDVKPQGYKLSFTSIPLSEIDKMIDEGKLFLFQIYNKDFAKKATGKKNLHTLYWENLFSVENLQDVVLKLNGEAELFWREASIKKDKVIVHKKGSILVNRTTTDGKSIPEAIYQEIYQLKNKMADSISDEAKRLLESGTVVCKVATHDIVKDKHFTENTYLFHCPITMNFKAKDRTNKEFNNHVLEVLNKNPDIKVIGLDRGERHLLYLSLINQKGEIECQKTLNLVEQVRNDKTVSVNYHEKLVHKEGSRDAARKNWQTIGNIKELKEGYLSAVVHEIASLMVKHNAIVVMEDLNFGFKRGRFAVERQIYQKFENMLIEKLNYLVFKDRKVTEPGGVLNAYQLANKSAKVTDVYKQCGWLFYIPAAYTSKIDPRTGFANLFITKGLTNVEKKKEFFGKFDSIRYDATESCFVFSFDYAKICDNADYKKKWDVYTRGTRLVYNKTERKNVSVNPTEELQCVFDEFGIKWNTGEDLIESISLIPAEKSNAKFFDVLLRMFNATLQMRNSVPNTDTDYLVSPVKAEDGSFFDSREEFKKGGDARLPIDCDANGAYHIALKGLYLLLNDFNRDNKGVIQNISNKDWFKFVQEKVYKDX

SEQ ID NO: 771 - protein, 1294 aa, synthetic construct
  VARIANT 1294: note = Any amino acid
MARIIDEFCGQMNGYTRSITLRNRLVPIGKTEENLKQFLEKDLERATAYPDIKNLIDAIHRNVIEDTLSKVALNWNEIFNILATYQNEKDKKKKAAIKKDLEKLQSGARKKIVEAFKKNPDFEKLFKEGLFKELLPELIKSAPVDEIAVKTKALECFNRFSTYFTGFHDNRKNMYSEEAKSTAISYRIVNENFPKFFANIKLFNYLKEHFPRIIIDTEESLKDYLKGKKLDSVFSIDGFNSVLAQSGIDFYNTVIGGISGEAGTKKTQGLNEKINLARQQLSKEEKNKLRGKMVVLFKQILSDRETSSFIPVGFANKEEVYSTVKEFNNSIAEKAVSKVRDLFLHREEFTLNEIFVPAKSLTDFSQAIFGSWSILSEGLFLLEKDSMKKALSESQEEKINKEIAKKDCSFTELQLAYERYCTEHNLPVEKFCKDYFDIVDYRGNGAKSEKTKVSILSEILETFLQLDFDHIQDLQQEKNAAIPIKAYLDEVQNLYHHLKLVDYRGEEQKDSTFYSKHDEILTDLSQIVPLYNKVRNFVTKKLGESKKIKLNFDCPTLANGWDENQESINDAIILRKDGKYYLGIYNPNNKPKFAKKDSIVGDCYEKMAYKQIALPMGLGAFVRKCFGTAQKYGWGCPENCLNSEGKIIIKDEEAKGNLEAIIDCYKDFLNKYEKDGFKYKDYNFSFLDSASYEKLSDFFNDVKPQGYKLSFTSIPLSEIDKMIDEGKLFLFQIYNKDFAKKATGKKNLHTLYWENLFSVENLQDVVLKLNGEAELFWREASIKKDKVIVHKKGSILVNRTTTDGKSIPEAIYQEIYQLKNKMADSISDEAKRLLESGTVVCKVATHDIVKDKHFTENTYLFHCPITMNFKAKDRTNKEFNNHVLEVLNKNPDIKVIGLDRGERHLLYLSLINQKGEIECQKTLNLVEQVRNDKTVSVNYHEKLVHKEGSRDAARKNWQTIGNIKELKEGYLSAVVHEIASLMVKHNAIVVMEDLNFGFKRGRFAVERQIYQKFENMLIEKLNYLVFKDRKVTEPGGVLNAYQLANKSAKVTDVYKQCGWLFYIPAAYTSKIDPRTGFANLFITKGLTNVEKKKEFFGKFDSIRYDATESCFVFSFDYAKICDNADYKKKWDVYTRGTRLVYNKTERKNVSVNPTEELQCVFDEFGIKWNTGEDLIESISLIPAEKSNAKFFDVLLRMFNATLQMRNSVPNTDTDYLVSPVKAEDGSFFDSREEFKKGGDARLPIDCDANGAYHIALKGLYLLLNDFNRDNKGVIQNISNKDWFKFVQEKVYKDX

SEQ ID NO: 772 - protein, 1294 aa, synthetic construct
  VARIANT 1294: note = Any amino acid
MARIIDEFCGQMNGYTRSITLRNRLVPIGKTEENLKQFLEKDLERATAYPDIKNLIDAIHRNVIEDTLSKVALNWNEIFNILATYQNEKDKKKKAAIKKDLEKLQSGARKKIVEAFKKNPDFEKLFKEGLFKELLPELIKSAPVDEIAVKTKALECFNRFSTYFTGFHDNRKNMYSEEAKSTAISYRIVNENFPKFFANIKLFNYLKEHFPRIIIDTEESLKDYLKGKKLDSVFSIDGFNSVLAQSGIDFYNTVIGGISGEAGTKKTQGLNEKINLARQQLSKEEKNKLRGKMVVLFKQILSDRETSSFIPVGFANKEEVYSTVKEFNNSIAEKAVSKVRDLFLHREEFTLNEIFVPAKSLTDFSQAIFGSWSILSEGLFLLEKDSMKKALSESQEEKINKEIAKKDCSFTELQLAYERYCTEHNLPVEKFCKDYFDIVDYRGNGAKSEKTKVSILSEILETFLQLDFDLIQDLQQEKNAAIPIKAYLDEVQNLYHHLKLVDYRGEEQKDSTFYSKHDEILTDLSQIVPLYNKVRNFVTKKLGESKKIKLNFDCPTLANGWDENQESSNDAIILRKDGKYYLGIYNPNNKPKFAKKDSIVGDCYEKMAYKQIALPMGLGAFVRKCFGTAQKYGWGCPENCLNSEGKIIIKDEEAKGNLEAIIDCYKDFLNKYEKDGFKYKDYNFSFLDSASYEKLSDFFNDVKPQGYKLSFTSIPLSEIDKMIDEGKLFLFQIYNKDFAKKATGKKNLHTLYWENLFSVENLQDVVLKLNGEAELFWREASIKKDKVIVHKKGSILVNRTTTDGKSIPEAIYQEIYQLKNKMADSISDEAKRLLESGTVVCKVATHDIVKDKHFTENTYLFHCPITMNFKAKDRTNKEFNNHVLEVLNKNPDIKVIGLDRGERHLLYLSLINQKGEIECQKTLNLVEQVRNDKTVSVNYHEKLVHKEGSRDAARKNWQTIGNIKELKEGYLSAVVHEIASLMVKHNAIVVMEDLNFGFKRGRFAVERQIYQKFENMLIEKLNYLVFKDRKVTEPGGVLNAYQLANKSAKVTDVYKQCGWLFYIPAAYTSKIDPRTGFANLFITKGLTNVEKKKEFFGKFDSIRYDATESCFVFSFDYAKICDNADYKKKWDVYTRGTRLVYNKTERKNVSVNPTEELQCVFDEFGIKWNTGEDLIESISLIPAEKSNAKFFDVLLRMFNATLQMRNSVPNTDTDYLVSPVKAEDGSFFDSREEFKKGGDARLPIDCDANGAYHIALKGLYLLLNDFNRDNKGVIQNISNKDWFKFVQEKVYKDX

SEQ ID NO: 773 - protein, 1294 aa, synthetic construct
  VARIANT 1294: note = Any amino acid
MARIIDEFCGQMNGYTRSITLRNRLVPIGKTEENLKQFLEKDLERATAYPDIKNLIDAIHRNVIEDTLSKVALNWNEIFNILATYQNEKDKKKKAAIKKDLEKLQSGARKKIVEAFKKNPDFEKLFKEGLFKELLPELIKSAPVDEIAVKTKALECFNRFSTYFTGFHDNRKNMYSEEAKSTAISYRIVNENFPKFFANIKLFNYLKEHFPRIIIDTEESLKDYLKGKKLDSVFSIDGFNSVLAQSGIDFYNTVIGGISGEAGTKKTQGLNEKINLARQQLSKEEKNKLRGKMVVLFKQILSDRETSSFIPVGFANKEEVYSTVKEFNNSIAEKAVSKVRDLFLHREEFTLNEIFVPAKSLTDFSQAIFGSWSILSEGLFLLEKDSMKKALSESQEEKINKEIAKKDCSFTELQLAYERYCTEHNLPVEKFCKDYFDIVDYRRNGAKSEKTKVSILSEILETFLQLDFDHIQDLQQEKNAAIPIKAYLDEVQNLYHHLKLVDYRGEEQKDSTFYSKHDEILTDLSQIVPLYNKVRNFVTKKLGESKKIKLNFDCPTLANGWDENQESSNDAIILRKDGKYYLGIYNPNNKPKFAKKDSIVGDCYEKMAYKQIALPMGLGAFVRKCFGTAQKYGWGCPENCLNSEGKIIIKDEEAKGNLEAIIDCYKDFLNKYEKDGFKYKDYNFSFLDSASYEKLSDFFNDVKPQGYKLSFTSIPLSEIDKMIDEGKLFLFQIYNKDFAKKATGKKNLHTLYWENLFSVENLQDVVLKLNGEAELFWREASIKKDKVIVHKKGSILVNRTTTDGKSIPEAIYQEIYQLKNKMADSISDEAKRLLESGTVVCKVATHDIVKDKHFTENTYLFHCPITMNFKAKDRTNKEFNNHVLEVLNKNPDIKVIGLDRGERHLLYLSLINQKGEIECQKTLNLVEQVRNDKTVSVNYHEKLVHKEGSRDAARKNWQTIGNIKELKEGYLSAVVHEIASLMVKHNAIVVMEDLNFGFKRGRFAVERQIYQKFENMLIEKLNYLVFKDRKVTEPGGVLNAYQLANKSAKVTDVYKQCGWLFYIPAAYTSKIDPRTGFANLFITKGLTNVEKKKEFFGKFDSIRYDATESCFVFSFDYAKICDNADYKKKWDVYTRGTRLVYNKTERKNVSVNPTEELQCVFDEFGIKWNTGEDLIESISLIPAEKSNAKFFDVLLRMFNATLQMRNSVPNTDTDYLVSPVKAEDGSFFDSREEFKKGGDARLPIDCDANGAYHIALKGLYLLLNDFNRDNKGVIQNISNKDWFKFVQEKVYKDX

SEQ ID NO: 774 - protein, 1294 aa, synthetic construct
  VARIANT 1294: note = Any amino acid
MARIIDEFCGQMNGYTRSITLRNRLVPIGKTEENLKQFLEKDLERATAYPDIKNLIDAIHRNVIEDTLSKVALNWNEIFNILATYQNEKDKKKKAAIKKDLEKLQSGARKKIVEAFKKNPDFEKLFKEGLFKELLPELIKSAPVDEIAVKTKALECFNRFSTYFTGFHDNRKNMYSEEAKSTAISYRIVNENFPKFFANIKLFNYLKEHFPRIIIDTEESLKDYLKGKKLDSVFSIDGFNSVLAQSGIDFYNTVIGGISGEAGTKKTQGLNEKINLARQQLSKEEKNKLRGKMVVLFKQILSDRETSSFIPVGFANKEEVYSTVKEFNNSIAEKAVSKVRDLFLHREEFTLNEIFVPAKSLTDFSQAIFGSWSILSEGLFLLEKDSMKKALSESQEEKINKEIAKKDCSFTELQLAYERYCTEHNLPVEKFCKDYFDIVDYRGNGAKSEKTKVSILSEILETFLQLDFDHIQDLQQEKNAAIPIKAYLDEVQNLYHHLKLVDYRGEEQKDSTFYSKHDEILTDLSQIVPLYNKVRNFVTKKLGESKKIKLNFDCPTLANGWDENQESSNDAIILRKDGKYYLGIYNPNNKSKFAKKDSIVGDCYEKMAYKQIALPMGLGAFVRKCFGTAQKYGWGCPENCLNSEGKIIIKDEEAKGNLEAIIDCYKDFLNKYEKDGFKYKDYNFSFLDSASYEKLSDFFNDVKPQGYKLSFTSIPLSEIDKMIDEGKLFLFQIYNKDFAKKATGKKNLHTLYWENLFSVENLQDVVLKLNGEAELFWREASIKKDKVIVHKKGSILVNRTTTDGKSIPEAIYQEIYQLKNKMADSISDEAKRLLESGTVVCKVATHDIVKDKHFTENTYLFHCPITMNFKAKDRTNKEFNNHVLEVLNKNPDIKVIGLDRGERHLLYLSLINQKGEIECQKTLNLVEQVRNDKTVSVNYHEKLVHKEGSRDAARKNWQTIGNIKELKEGYLSAVVHEIASLMVKHNAIVVMEDLNFGFKRGRFAVERQIYQKFENMLIEKLNYLVFKDRKVTEPGGVLNAYQLANKSAKVTDVYKQCGWLFYIPAAYTSKIDPRTGFANLFITKGLTNVEKKKEFFGKFDSIRYDATESCFVFSFDYAKICDNADYKKKWDVYTRGTRLVYNKTERKNVSVNPTEELQCVFDEFGIKWNTGEDLIESISLIPAEKSNAKFFDVLLRMFNATLQMRNSVPNTDTDYLVSPVKAEDGSFFDSREEFKKGGDARLPIDCDANGAYHIALKGLYLLLNDFNRDNKGVIQNISNKDWFKFVQEKVYKDX

SEQ ID NO: 775 - protein, 1294 aa, synthetic construct
  VARIANT 1294: note = Any amino acid
MARIIDEFCGQMNGYTRSITLRNRLVPIGKTEENLKQFLEKDLERATAYPDIKNLIDAIHRNVIEDTLSKVALNWNEIFNILATYQNEKDKKKKAAIKKDLEKLQSGARKKIVEAFKKNPDFEKLFKEGLFKELLPELIKSAPVDEIAVKTKALECFNRFSTYFTGFHDNRKNMYSEEAKSTAISYRIVNENFPKFFANIKLFNYLKEHFPRIIIDTEESLKDYLKGKKLDSVFSIDGFNSVLAQSGIDFYNTVIGGISGEAGTKKTQGLNEKINLARQQLSKEEKNKLRGKMVVLFKQILSDRETSSFIPVGFANKEEVYSTVKEFNNSIAEKAVSKVRDLFLHREEFTLNEIFVPAKSLTDFSQAIFGSWSILSEGLFLLEKDSMKKALSESQEEKINKEIAKKDCSFTELQLAYERYCTEHNLPVEKFCKDYFDIVDYRGNGAKSEKTKVSILSEILETFLQLDFDHIQDLQQEKNAAIPIKAYLDEVQNLYHHLKLVDYRGEEQKDSTFYSTHDEILTDLSQIVPLYNKVRNFVTKKLGESKKIKLNFDCPTLANGWDENQESSNDAIILRKDGKYYLGIYNPNNKPKFAKKDSIVGDCYEKMAYKQIALPMGLGAFVRKCFGTAQKYGWGCPENCLNSEGKIIIKDEEAKGNLEAIIDCYKDFLNKYEKDGFKYKDYNFSFLDSASYEKLSDFFNDVKPQGYKLSFTSIPLSEIDKMIDEGKLFLFQIYNKDFAKKATGKKNLHTLYWENLFSVENLQDVVLKLNGEAELFWREASIKKDKVIVHKKGSILVNRTTTDGKSIPEAIYQEIYQLKNKMADSISDEAKRLLESGTVVCKVATHDIVKDKHFTENTYLFHCPITMNFKAKDRTNKEFNNHVLEVLNKNPDIKVIGLDRGERHLLYLSLINQKGEIECQKTLNLVEQVRNDKTVSVNYHEKLVHKEGSRDAARKNWQTIGNIKELKEGYLSAVVHEIASLMVKHNAIVVMEDLNFGFKRGRFAVERQIYQKFENMLIEKLNYLVFKDRKVTEPGGVLNAYQLANKSAKVTDVYKQCGWLFYIPAAYTSKIDPRTGFANLFITKGLTNVEKKKEFFGKFDSIRYDATESCFVFSFDYAKICDNADYKKKWDVYTRGTRLVYNKTERKNVSVNPTEELQCVFDEFGIKWNTGEDLIESISLIPAEKSNAKFFDVLLRMFNATLQMRNSVPNTDTDYLVSPVKAEDGSFFDSREEFKKGGDARLPIDCDANGAYHIALKGLYLLLNDFNRDNKGVIQNISNKDWFKFVQEKVYKDX

SEQ ID NO: 776 - protein, 1294 aa, synthetic construct
  VARIANT 1294: note = Any amino acid
MARIIDEFCGQMNGYTRSITLRNRLVPIGKTEENLKQFLEKDLERATAYPDIKNLIDAIHRNVIEDTLSKVALNWNEIFNILATYQNEKDKKKKAAIKKDLEKLQSGARKKIVEAFKKNPDFEKLFKEGLFKELLPELIKSAPVDEIAVKTKALECFNRFSTYFTGFHDNRKNMYSEEAKSTAISYRIVNENFPKFFANIKLFNYLKEHFPRIIIDTEESLKDYLKGKKLDSVFSIDGFNSVLAQSGIDFYNTVIGGISGEAGTKKTQGLNEKINLARQQLSKEEKNKLRGKMVVLFKQILSDRETSSFIPVGFANKEEVYSTVKEFNNSIAEKAVSKVRDLFLHREEFTLNEIFVPAKSLTDFSQAIFGSWSILSEGLFLLVKDSMKKALSESQEEKINKEIAKKDCSFTELQLAYERYCTEHNLPVEKFCKDYFDIVDYRGNGAKSEKTKVSILSEILETFLQLDFDHIQDLQQEKNAAIPIKAYLDEVQNLYHHLKLVDYRGEEQKDSTFYSKHDEILTDLSQIVPLYNKVRNFVTKKLGESKKIKLNFDCPTLANGWDENQESSNDAIILRKDGKYYLGIYNPNNKPKFAKKDSIVGDCYEKMAYKQIALPMGLGAFVRKCFGTAQKYGWGCPENCLNSEGKIIIKDEEAKGNLEAIIDCYKDFLNKYEKDGFKYKDYNFSFLDSASYEKLSDFFNDVKPQGYKLSFTSIPLSEIDKMIDEGKLFLFQIYNKDFAKKATGKKNLHTLYWENLFSVENLQDVVLKLNGEAELFWREASIKKDKVIVHKKGSILVNRTTTDGKSIPEAIYQEIYQLKNKMADSISDEAKRLLESGTVVCKVATHDIVKDKHFTENTYLFHCPITMNFKAKDRTNKEFNNHVLEVLNKNPDIKVIGLDRGERHLLYLSLINQKGEIECQKTLNLVEQVRNDKTVSVNYHEKLVHKEGSRDAARKNWQTIGNIKELKEGYLSAVVHEIASLMVKHNAIVVMEDLNFGFKRGRFAVERQIYQKFENMLIEKLNYLVFKDRKVTEPGGVLNAYQLANKSAKVTDVYKQCGWLFYIPAAYTSKIDPRTGFANLFITKGLTNVEKKKEFFGKFDSIRYDATESCFVFSFDYAKICDNADYKKKWDVYTRGTRLVYNKTERKNVSVNPTEELQCVFDEFGIKWNTGEDLIESISLIPAEKSNAKFFDVLLRMFNATLQMRNSVPNTDTDYLVSPVKAEDGSFFDSREEFKKGGDARLPIDCDANGAYHIALKGLYLLLNDFNRDNKGVIQNISNKDWFKFVQEKVYKDX

SEQ ID NO: 777 - protein, 1294 aa, synthetic construct
  VARIANT 1294: note = Any amino acid
MARIIDEFCGQMNGYTRSITLRNRLVPIGKTEENLKQFLEKDLERATAYPDIKNLIDAIHRNVIEDTLSKVALNWNEIFNILATYQNEKDKKKKAAIKKDLEKLQSGARKKIVEAFKKNPDFEKLFKEGLFKELLPELIKSAPVDEIAVKTKALECFNRFSTYFTGFHDNRKNMYSEEAKSTAISYRIVNENFPKFFANIKLFNYLKEHFPRIIIDTEESLKDYLKGKKLDSVFSIDGFNSVLAQSGIDFYNTVIGGISGEAGTKKTQGLNEKINLARQQLSKEEKNKLRGKMVVLFKQILSDRETSSFIPVGFANKEEVYSTVKEFNNSIAEKAVSKVRDLFLHREEFTLNEIFVPAKSLTDFSQAIFGSWSILSEGLFLLEKDSMKKALSESQEEKINKEIAKKDCSFTELQLAYERYCTEHNLPVEKFCKDYFDIVDYRGNGAKSEKTKVSILSEILETFLQLDFDHIQDQQQEKNAAIPIKAYLDEVQNLYHHLKLVDYRGEEQKDSTFYSKHDEILTDLSQIVPLYNKVRNFVTKKLGESKKIKLNFDCPTLANGWDENQESSNDAIILRKDGKYYLGIYNPNNKPKFAKKDSIVGDCYEKMAYKQIALPMGLGAFVRKCFGTAQKYGWGCPENCLNSEGKIIIKDEEAKGNLEAIIDCYKDFLNKYEKDGFKYKDYNFSFLDSASYEKLSDFFNDVKPQGYKLSFTSIPLSEIDKMIDEGKLFLFQIYNKDFAKKATGKKNLHTLYWENLFSVENLQDVVLKLNGEAELFWREASIKKDKVIVHKKGSILVNRTTTDGKSIPEAIYQEIYQLKNKMADSISDEAKRLLESGTVVCKVATHDIVKDKHFTENTYLFHCPITMNFKAKDRTNKEFNNHVLEVLNKNPDIKVIGLDRGERHLLYLSLINQKGEIECQKTLNLVEQVRNDKTVSVNYHEKLVHKEGSRDAARKNWQTIGNIKELKEGYLSAVVHEIASLMVKHNAIVVMEDLNFGFKRGRFAVERQIYQKFENMLIEKLNYLVFKDRKVTEPGGVLNAYQLANKSAKVTDVYKQCGWLFYIPAAYTSKIDPRTGFANLFITKGLTNVEKKKEFFGKFDSIRYDATESCFVFSFDYAKICDNADYKKKWDVYTRGTRLVYNKTERKNVSVNPTEELQCVFDEFGIKWNTGEDLIESISLIPAEKSNAKFFDVLLRMFNATLQMRNSVPNTDTDYLVSPVKAEDGSFFDSREEFKKGGDARLPIDCDANGAYHIALKGLYLLLNDFNRDNKGVIQNISNKDWFKFVQEKVYKDX

SEQ ID NO: 778 - protein, 1294 aa, synthetic construct
  VARIANT 1294: note = Any amino acid
MARIIDEFCGQMNGYTRSITLRNRLVPIGKTEENLKQFLEKDLERATAYPDIKNLIDAIHRNVIEDTLSKVALNWNEIFNILATYQNEKDKKKKAAIKKDLEKLQSGARKKIVEAFKKNPDFEKLFKEGLFKELLPELIKSAPVDEIAVKTKALECFNRFSTYFTGFHDNRKNMYSEEAKSTAISYRIVNENFPKFFANIKLFNYLKEHFPRIIIDTEESLKDYLKGKKLDSVFSIDGFNSVLAQSGIDFYNTVIGGISGEAGTKKTQGLNEKINLARQQLSKEEKNKLRGKMVVLFKQILSDRETSSFIPVGFANKEEVYSTVKEFNNSIAEKAVSKVRDLFLHREEFTLNEIFVPAKSLTDFSQAIFGSWSILSEGLFLLEKDSMKKALSESQEEKINKEIAKKDCSFTELQLAYERYCTEHNLPVEKFCKDYFDIVDYRGNGAKSEKTKVSILSEILETFLQLDFDNIQDLQQEKNAAIPIKAYLDEVQNLYHHLKLVDYRGEEQKDSTFYSKHDEILTDLSQIVPLYNKVRNFVTKKLGESKKIKLNFDCPTLANGWDENQESSNDAIILRKDGKYYLGIYNPNNKPKFAKKDSIVGDCYEKMAYKQIALPMGLGAFVRKCFGTAQKYGWGCPENCLNSEGKIIIKDEEAKGNLEAIIDCYKDFLNKYEKDGFKYKDYNFSFLDSASYEKLSDFFNDVKPQGYKLSFTSIPLSEIDKMIDEGKLFLFQIYNKDFAKKATGKKNLHTLYWENLFSVENLQDVVLKLNGEAELFWREASIKKDKVIVHKKGSILVNRTTTDGKSIPEAIYQEIYQLKNKMADSISDEAKRLLESGTVVCKVATHDIVKDKHFTENTYLFHCPITMNFKAKDRTNKEFNNHVLEVLNKNPDIKVIGLDRGERHLLYLSLINQKGEIECQKTLNLVEQVRNDKTVSVNYHEKLVHKEGSRDAARKNWQTIGNIKELKEGYLSAVVHEIASLMVKHNAIVVMEDLNFGFKRGRFAVERQIYQKFENMLIEKLNYLVFKDRKVTEPGGVLNAYQLANKSAKVTDVYKQCGWLFYIPAAYTSKIDPRTGFANLFITKGLTNVEKKKEFFGKFDSIRYDATESCFVFSFDYAKICDNADYKKKWDVYTRGTRLVYNKTERKNVSVNPTEELQCVFDEFGIKWNTGEDLIESISLIPAEKSNAKFFDVLLRMFNATLQMRNSVPNTDTDYLVSPVKAEDGSFFDSREEFKKGGDARLPIDCDANGAYHIALKGLYLLLNDFNRDNKGVIQNISNKDWFKFVQEKVYKDX

SEQ ID NO: 779 - protein, 1294 aa, synthetic construct
  VARIANT 1294: note = Any amino acid
MARIIDEFCGQMNGYTRSITLRNRLVPIGKTEENLKQFLEKDLERATAYPDIKNLIDAIHRNVIEDTLSKVALNWNEIFNILATYQNEKDKKKKAAIKKDLEKLQSGARKKIVEAFKKNPDFEKLFKEGLFKELLPELIKSAPVDEIAVKTKALECFNRFSTYFTGFHDNRKNMYSEEAKSTAISYRIVNENFPKFFANIKLFNYLKEHFPRIIIDTEESLKDYLKGKKLDSVFSIDGFNSVLAQSGIDFYNTVIGGISGEAGTKKTQGLNEKINLARQQLSKEEKNKLRGKMVVLFKQILSDRETSSFIPVGFANKEEVYSTVKEFNNSIAEKAVSKVRDLFLHREEFTLNEIFVPAKSLTDFSQAIFGSWSILSEGLFLLEKDSMKKALSESQEEKINKVIAKKDCSFTELQLAYERYCTEHNLPVEKFCKDYFDIVDYRGNGAKSEKTKVSILSEILETFLQLDFDHIQDLQQEKNAAIPIKAYLDEVQNLYHHLKLVDYRGEEQKDSTFYSKHDEILTDLSQIVPLYNKVRNFVTKKLGESKKIKLNFDCPTLANGWDENQESSNDAIILRKDGKYYLGIYNPNNKPKFAKKDSIVGDCYEKMAYKQIALPMGLGAFVRKCFGTAQKYGWGCPENCLNSEGKIIIKDEEAKGNLEAIIDCYKDFLNKYEKDGFKYKDYNFSFLDSASYEKLSDFFNDVKPQGYKLSFTSIPLSEIDKMIDEGKLFLFQIYNKDFAKKATGKKNLHTLYWENLFSVENLQDVVLKLNGEAELFWREASIKKDKVIVHKKGSILVNRTTTDGKSIPEAIYQEIYQLKNKMADSISDEAKRLLESGTVVCKVATHDIVKDKHFTENTYLFHCPITMNFKAKDRTNKEFNNHVLEVLNKNPDIKVIGLDRGERHLLYLSLINQKGEIECQKTLNLVEQVRNDKTVSVNYHEKLVHKEGSRDAARKNWQTIGNIKELKEGYLSAVVHEIASLMVKHNAIVVMEDLNFGFKRGRFAVERQIYQKFENMLIEKLNYLVFKDRKVTEPGGVLNAYQLANKSAKVTDVYKQCGWLFYIPAAYTSKIDPRTGFANLFITKGLTNVEKKKEFFGKFDSIRYDATESCFVFSFDYAKICDNADYKKKWDVYTRGTRLVYNKTERKNVSVNPTEELQCVFDEFGIKWNTGEDLIESISLIPAEKSNAKFFDVLLRMFNATLQMRNSVPNTDTDYLVSPVKAEDGSFFDSREEFKKGGDARLPIDCDANGAYHIALKGLYLLLNDFNRDNKGVIQNISNKDWFKFVQEKVYKDX

SEQ ID NO: 780 - protein, 1294 aa, synthetic construct
  VARIANT 1294: note = Any amino acid
MARIIDEFCGQMNGYTRSITLRNRLVPIGKTEENLKQFLEKDLERATAYPDIKNLIDAIHRNVIEDTLSKVALNWNEIFNILATYQNEKDKKKKAAIKKDLEKLQSGARKKIVEAFKKNPDFEKLFKEGLFKELLPELIKSAPVDEIAVKTKALECFNRFSTYFTGFHDNRKNMYSEEAKSTAISYRIVNENFPKFFANIKLFNYLKEHFPRIIIDTEESLKDYLKGKKLDSVFSIDGFNSVLAQSGIDFYNTVIGGISGEAGTKKTQGLNEKINLARQQLSKEEKNKLRGKMVVLFKQILSDRETSSFIPVGFANKEEVYSTVKEFNNSIAEKAVSKVRDLFLHREEFTLNEIFVPAKSLTDFSQAIFGSWSILSEGLFLLEKDSMKKALSESQEEKINKEIAKKDCSFTELQLAYERYCTEHNLPVEKFCKDYFDIVDYRGNGAKSEKTKVSILSEILETFLRLDFDHIQDLQQEKNAAIPIKAYLDEVQNLYHHLKLVDYRGEEQKDSTFYSKHDEILTDLSQIVPLYNKVRNFVTKKLGESKKIKLNFDCPTLANGWDENQESSNDAIILRKDGKYYLGIYNPNNKPKFAKKDSIVGDCYEKMAYKQIALPMGLGAFVRKCFGTAQKYGWGCPENCLNSEGKIIIKDEEAKGNLEAIIDCYKDFLNKYEKDGFKYKDYNFSFLDSASYEKLSDFFNDVKPQGYKLSFTSIPLSEIDKMIDEGKLFLFQIYNKDFAKKATGKKNLHTLYWENLFSVENLQDVVLKLNGEAELFWREASIKKDKVIVHKKGSILVNRTTTDGKSIPEAIYQEIYQLKNKMADSISDEAKRLLESGTVVCKVATHDIVKDKHFTENTYLFHCPITMNFKAKDRTNKEFNNHVLEVLNKNPDIKVIGLDRGERHLLYLSLINQKGEIECQKTLNLVEQVRNDKTVSVNYHEKLVHKEGSRDAARKNWQTIGNIKELKEGYLSAVVHEIASLMVKHNAIVVMEDLNFGFKRGRFAVERQIYQKFENMLIEKLNYLVFKDRKVTEPGGVLNAYQLANKSAKVTDVYKQCGWLFYIPAAYTSKIDPRTGFANLFITKGLTNVEKKKEFFGKFDSIRYDATESCFVFSFDYAKICDNADYKKKWDVYTRGTRLVYNKTERKNVSVNPTEELQCVFDEFGIKWNTGEDLIESISLIPAEKSNAKFFDVLLRMFNATLQMRNSVPNTDTDYLVSPVKAEDGSFFDSREEFKKGGDARLPIDCDANGAYHIALKGLYLLLNDFNRDNKGVIQNISNKDWFKFVQEKVYKDX

SEQ ID NO: 781 - protein, 1294 aa, synthetic construct
  VARIANT 1294: note = Any amino acid
MARIIDEFCGQMNGYTRSITLRNRLVPIGKTEENLKQFLEKDLERATAYPDIKNLIDAIHRNVIEDTLSKVALNWNEIFNILATYQNEKDKKKKAAIKKDLEKLQSGARKKIVEAFKKNPDFEKLFKEGLFKELLPELIKSAPVDEIAVKTKALECFNRFSTYFTGFHDNRKNMYSEEAKSTAISYRIVNENFPKFFANIKLFNYLKEHFPRIIIDTEESLKDYLKGKKLDSVFSIDGFNSVLAQSGIDFYNTVIGGISGEAGTKKTQGLNEKINLARQQLSKEEKNKLRGKMVVLFKQILSDRETSSFIPVGFANKEEVYSTVKEFNNSIAEKAVSKVRDLFLHREEFTLNEIFVPAKSLTDFSQAIFGSWSILSEGLFLLEKDSMKKALSESQEEKINKEIAKKDCSFTELQLAYERYCTEHNLPVEKFCKDYFDIVDYRGNGAKSEKTKVSILSEILETFLQLDFDHIQDLQQEKNAAIPIKAYLDEVQNLYHHLKLVDYRGEEQKDSTFYSKHDEILTDLSQIVPLYNKVRNIVTKKLGESKKIKLNFDCPTLANGWDENQESSNDAIILRKDGKYYLGIYNPNNKPKFAKKDSIVGDCYEKMAYKQIALPMGLGAFVRKCFGTAQKYGWGCPENCLNSEGKIIIKDEEAKGNLEAIIDCYKDFLNKYEKDGFKYKDYNFSFLDSASYEKLSDFFNDVKPQGYKLSFTSIPLSEIDKMIDEGKLFLFQIYNKDFAKKATGKKNLHTLYWENLFSVENLQDVVLKLNGEAELFWREASIKKDKVIVHKKGSILVNRTTTDGKSIPEAIYQEIYQLKNKMADSISDEAKRLLESGTVVCKVATHDIVKDKHFTENTYLFHCPITMNFKAKDRTNKEFNNHVLEVLNKNPDIKVIGLDRGERHLLYLSLINQKGEIECQKTLNLVEQVRNDKTVSVNYHEKLVHKEGSRDAARKNWQTIGNIKELKEGYLSAVVHEIASLMVKHNAIVVMEDLNFGFKRGRFAVERQIYQKFENMLIEKLNYLVFKDRKVTEPGGVLNAYQLANKSAKVTDVYKQCGWLFYIPAAYTSKIDPRTGFANLFITKGLTNVEKKKEFFGKFDSIRYDATESCFVFSFDYAKICDNADYKKKWDVYTRGTRLVYNKTERKNVSVNPTEELQCVFDEFGIKWNTGEDLIESISLIPAEKSNAKFFDVLLRMFNATLQMRNSVPNTDTDYLVSPVKAEDGSFFDSREEFKKGGDARLPIDCDANGAYHIALKGLYLLLNDFNRDNKGVIQNISNKDWFKFVQEKVYKDX

SEQ ID NO: 782 - protein, 1294 aa, synthetic construct
  VARIANT 1294: note = Any amino acid
MARIIDEFCGQMNGYTRSITLRNRLVPIGKTEENLKQFLEKDLERATAYPDIKNLIDAIHRNVIEDTLSKVALNWNEIFNILATYQNEKDKKKKAAIKKDLEKLQSGARKKIVEAFKKNPDFEKLFKEGLFKELLPELIKSAPVDEIAVKTKALECFNRFSTYFTGFHDNRKNMYSEEAKSTAISYRIVNENFPKFFANIKLFNYLKEHFPRIIIDTEESLKDYLKGKKLDSVFSIDGFNSVLAQSGIDFYNTVIGGISGEAGTKKTQGLNEKINLARQQLSKEEKNKLRGKMVVLFKQILSDRETSSFIPVGFANKEEVYSTVKEFNNSIAEKAVSKVRDLFLHREEFTLNEIFVPAKSLTDFSQAIFGSWSILSEGLFLLEKDSMKKALSESQEEKINKEIAKKDCSFTELQLAYERYCTEHNLPVEKFCKDYFDIVDYRGNGAKSEKTKVSILSEILETFLQLDFDHIQDLQQEKNAAIPIKAYLDEVQNLYHHLKLVDYRGEEQKDSTFYSKHDEILTDLSQIVPLYNKVRNFVTKKLGESKKIKLNFDCPTLANGWDENQESSNDAIILRKDGKYYLGIYNPNNKPKFAKKDSIVGDCYEKMAYKQIALPMGLGAFVRKCFGTAQKYGWGCPENCLNSEGKIIIKDEEAKGNLEAIIDCYKDFLNKYEKDGFKYKDYNFSFLDSASYEKLSDFFNDVKPQGYKLSFTSIPLSEIDKMIDEGKLFLFQIYNKDFAKKATGMKNLHTLYWENLFSVENLQDVVLKLNGEAELFWREASIKKDKVIVHKKGSILVNRTTTDGKSIPEAIYQEIYQLKNKMADSISDEAKRLLESGTVVCKVATHDIVKDKHFTENTYLFHCPITMNFKAKDRTNKEFNNHVLEVLNKNPDIKVIGLDRGERHLLYLSLINQKGEIECQKTLNLVEQVRNDKTVSVNYHEKLVHKEGSRDAARKNWQTIGNIKELKEGYLSAVVHEIASLMVKHNAIVVMEDLNFGFKRGRFAVERQIYQKFENMLIEKLNYLVFKDRKVTEPGGVLNAYQLANKSAKVTDVYKQCGWLFYIPAAYTSKIDPRTGFANLFITKGLTNVEKKKEFFGKFDSIRYDATESCFVFSFDYAKICDNADYKKKWDVYTRGTRLVYNKTERKNVSVNPTEELQCVFDEFGIKWNTGEDLIESISLIPAEKSNAKFFDVLLRMFNATLQMRNSVPNTDTDYLVSPVKAEDGSFFDSREEFKKGGDARLPIDCDANGAYHIALKGLYLLLNDFNRDNKGVIQNISNKDWFKFVQEKVYKDX

SEQ ID NO: 783 - protein, 1294 aa, synthetic construct
  VARIANT 1294: note = Any amino acid
MARIIDEFCGQMNGYTRSITLRNRLVPIGKTEENLKQFLEKDLERATAYPDIKNLIDAIHRNVIEDTLSKVALNWNEIFNILATYQNEKDKKKKAAIKKDLEKLQSGARKKIVEAFKKNPDFEKLFKEGLFKELLPELIKSAPVDEIAVKTKALECFNRFSTYFTGFHDNRKNMYSEEAKSTAISYRIVNENFPKFFANIKLFNYLKEHFPRIIIDTEESLKDYLKGKKLDSVFSIDGFNSVLAQSGIDFYNTVIGGISGEAGTKKTQGLNEKINLARQQLSKEEKNKLRGKMVVLFKQILSDRETSSFIPVGFANKEEVYSTVKEFNNSIAEKAVSKVRDLFLHREEFTLNEIFVPAKSLTDFSQAIFGSWSILSEGLFLLEKDSMKKALSESQEEKINKEIAKKDCSFTELQLAYERYCTEHNLPVEKFCKDYFDIVDYRGNGAKSEKTKVSILSEILETFLQLDFDHIQDLQQEKNAAIPIKAYLDEVQNLYHHLKLVDYRGEEQKDSTFYSKHDEILTDLSQIVPLYNKVRNFVTKKLGESKKIKLNFDCPTLANGWDENQESSNDAIILRKDGKYYLGIYNPNNKPKFAKKDSIVGDCYEKMAYKQIALPMGLGAFVRKCFGTAQKYGWGCPENCLNSEGKIIIKDEEAKGNLEAIIDCYKDFLNKYEKDGFKYKDYNFSFLDSASYEKLSDFFNDVKPQGYKLSFTSIPLSEIDKMIDEGKLFLFQIYNKDFAKKATGKKNLHTLYWENLFSVENLQDVVLKLNGEAELFWREASIKKDKVIVHKKGSILVNRTTTDGKSIPEAIYQEIYQLKNKMADSISDEAKRLLESGSVVCKVATHDIVKDKHFTENTYLFHCPITMNFKAKDRTNKEFNNHVLEVLNKNPDIKVIGLDRGERHLLYLSLINQKGEIECQKTLNLVEQVRNDKTVSVNYHEKLVHKEGSRDAARKNWQTIGNIKELKEGYLSAVVHEIASLMVKHNAIVVMEDLNFGFKRGRFAVERQIYQKFENMLIEKLNYLVFKDRKVTEPGGVLNAYQLANKSAKVTDVYKQCGWLFYIPAAYTSKIDPRTGFANLFITKGLTNVEKKKEFFGKFDSIRYDATESCFVFSFDYAKICDNADYKKKWDVYTRGTRLVYNKTERKNVSVNPTEELQCVFDEFGIKWNTGEDLIESISLIPAEKSNAKFFDVLLRMFNATLQMRNSVPNTDTDYLVSPVKAEDGSFFDSREEFKKGGDARLPIDCDANGAYHIALKGLYLLLNDFNRDNKGVIQNISNKDWFKFVQEKVYKDX

SEQ ID NO: 784 - protein, 1294 aa, synthetic construct
  VARIANT 1294: note = Any amino acid
MARIIDEFCGQMNGYTRSITLRNRLVPIGKTEENLKQFLEKDLERATAYPDIKNLIDAIHRNVIEDTLSKVALNWNEIFNILATYQNEKDKKKKAAIKKDLEKLQSGARKKIVEAFKKNPDFEKLFKEGLFKELLPELIKSAPVDEIAVKTKALECFNRFSTYFTGFHDNRKNMYSEEAKSTAISYRIVNENFPKFFANIKLFNYLKEHFPRIIIDTEESLKDYLKGKKLDSVFSIDGFNSVLAQSGIDFYNTVIGGISGEAGTKKTQGLNEKINLARQQLSKEEKNKLRGKMVVLFKQILSDRETSSFIPVGFANKEEVYSTVKEFNNSIAEKAVSKVRDLFLHREEFTLNEIFVPAKSLTDFSQAIFGSWSILSEGLFLLEKDSMKKALSESQEEKINKEIAKKDCSFTELQLAYERYCTEHNLPVEKFCKDYFDIVDYRGNGAKSEKTKVSILSEILETFLQLDFDHIQDLQQEKNAAIPIKAYLDEVQNLYHHLKLVDYRGEEQKDSTFYSKHDEILTDLSQIVPLYNKVRNFVTKKLGESKKIKLNFDCPTLANGWDENQESSNDAIILRKDGKYYLGIYNPNNKPKFAKKDSIVGDCYEKMAYKQIALPMGLGAFVRKCFGTAQKYGWGCPENCLNSEGKIIIKDEEAKGNLEAIIDCYKDFLNKYEKDGFKYKDYNFSFLDSASYEKLSDFFNDVKPQGYKLSFTSIPLSEIDKMIDEGKLFLFQIYIKDFAKKATGKKNLHTLYWENLFSVENLQDVVLKLNGEAELFWREASIKKDKVIVHKKGSILVNRTTTDGKSIPEAIYQEIYQLKNKMADSISDEAKRLLESGTVVCKVATHDIVKDKHFTENTYLFHCPITMNFKAKDRTNKEFNNHVLEVLNKNPDIKVIGLDRGERHLLYLSLINQKGEIECQKTLNLVEQVRNDKTVSVNYHEKLVHKEGSRDAARKNWQTIGNIKELKEGYLSAVVHEIASLMVKHNAIVVMEDLNFGFKRGRFAVERQIYQKFENMLIEKLNYLVFKDRKVTEPGGVLNAYQLANKSAKVTDVYKQCGWLFYIPAAYTSKIDPRTGFANLFITKGLTNVEKKKEFFGKFDSIRYDATESCFVFSFDYAKICDNADYKKKWDVYTRGTRLVYNKTERKNVSVNPTEELQCVFDEFGIKWNTGEDLIESISLIPAEKSNAKFFDVLLRMFNATLQMRNSVPNTDTDYLVSPVKAEDGSFFDSREEFKKGGDARLPIDCDANGAYHIALKGLYLLLNDFNRDNKGVIQNISNKDWFKFVQEKVYKDX

SEQ ID NO: 785 - protein, 1294 aa, synthetic construct
  VARIANT 1294: note = Any amino acid
MARIIDEFCGQMNGYTRSITLRNRLVPIGKTEENLKQFLEKDLERATAYPDIKNLIDAIHRNVIEDTLSKVALNWNEIFNILATYQNEKDKKKKAAIKKDLEKLQSGARKKIVEAFKKNPDFEKLFKEGLFKELLPELIKSAPVDEIAVKTKALECFNRFSTYFTGFHDNRKNMYSEEAKSTAISYRIVNENFPKFFANIKLFNYLKEHFPRIIIDTEESLKDYLKGKKLDSVFSIDGFNSVLAQSGIDFYNTVIGGISGEAGTKKTQGLNEKINLARQQLSKEEKNKLRGKMVVLFKQILSDRETSSFIPVGFANKEEVYSTVKEFNNSIAEKAVSKVRDLFLHREEFTLNEIFVPAKSLTDFSQAIFGSWSILSEGLFLLEKDSMKKALSESQEEKINKEIAKKDCSFTELQLAYERYCTEHNLPVEKFCKDYFDIVDYRGNGAKSEKTKVSILSEILETFLQLDFDHIQDLQQEKNAAIPIKAYLDEVQNLYHHLKLVDYRGEEQKDSTFYSKHDEILTDLSQIVPLYNKVRNFVTKKLGESKKIKLNFDCPTLANGWDENQESSNDAIILRKDGKYYLGIYNPNNKPKFAKKDSIVGDCYEKMAYKQIALPMGLGAFVRKCFGTAQKYGWGCPENCLNSEGKIIIKDEEAKGNLEAIIDCYKDFLNKYEKDGFKYKDYNFSFLDSASYEKLSDFFNDVKPQGYKLSFTSIPLSEIDKMVDEGKLFLFQIYNKDFAKKATGKKNLHTLYWENLFSVENLQDVVLKLNGEAELFWREASIKKDKVIVHKKGSILVNRTTTDGKSIPEAIYQEIYQLKNKMADSISDEAKRLLESGTVVCKVATHDIVKDKHFTENTYLFHCPITMNFKAKDRTNKEFNNHVLEVLNKNPDIKVIGLDRGERHLLYLSLINQKGEIECQKTLNLVEQVRNDKTVSVNYHEKLVHKEGSRDAARKNWQTIGNIKELKEGYLSAVVHEIASLMVKHNAIVVMEDLNFGFKRGRFAVERQIYQKFENMLIEKLNYLVFKDRKVTEPGGVLNAYQLANKSAKVTDVYKQCGWLFYIPAAYTSKIDPRTGFANLFITKGLTNVEKKKEFFGKFDSIRYDATESCFVFSFDYAKICDNADYKKKWDVYTRGTRLVYNKTERKNVSVNPTEELQCVFDEFGIKWNTGEDLIESISLIPAEKSNAKFFDVLLRMFNATLQMRNSVPNTDTDYLVSPVKAEDGSFFDSREEFKKGGDARLPIDCDANGAYHIALKGLYLLLNDFNRDNKGVIQNISNKDWFKFVQEKVYKDX

SEQ ID NO: 786 - protein, 1294 aa, synthetic construct
  VARIANT 1294: note = Any amino acid
MARIIDEFCGQMNGYTRSITLRNRLVPIGKTEENLKQFLEKDLERATAYPDIKNLIDAIHRNVIEDTLSKVALNWNEIFNILATYQNEKDKKKKAAIKKDLEKLQSGARKKIVEAFKKNPDFEKLFKEGLFKELLPELIKSAPVDEIAVKTKALECFNRFSTYFTGFHDNRKNMYSEEAKSTAISYRIVNENFPKFFANIKLFNYLKEHFPRIIIDTEESLKDYLKGKKLDSVFSIDGFNSVLAQSGIDFYNTVIGGISGEAGTKKTQGLNEKINLARQQLSKEEKNKLRGKMVVLFKQILSDRETSSFIPVGFANKEEVYSTVKEFNNSIAEKAVSKVRDLFLHREEFTLNEIFVPAKSLTDFSQAIFGSWSILSEGLFLLEKDSMKKALSESQEEKINKEIAKKDCSFTELQLAYERYCTEHNLPVEKFCKDYFDIVDYRGNGAKSEKTKVSILSEILETFLQLDFDHIQDLQQEKNAAIPIKAYLDEVQNLYHHLKLVDYRGEEQKDSTFYSKHDEILTDLSQIVPLYNKVRNFVTKKLGESKKIKLNFDCPTLANGWDENQESSNDAIILRKDGKYYLGIYNPNNKPKFAKKDSIVGDCYEKMAYKQIALPMGLGAFVRKCFGTAQKYGWGCPENCLNSEGKIIIKDEEAKGNLEAIIDCYKDFLNKYEKDGFKYKDYNFSFLDSASYEKLSDFFNDVKPQGYKLSFTSIPLSEIDKMIDEGKLFLFQIYNKDFAKKATGKKNLHTLYWENLFSVENLQDVVLKLNGEAELFWREASIKKDKVIVHKKGSILVNRTTTDGKSIPEAIYQEIYQLKNIMADSISDEAKRLLESGTVVCKVATHDIVKDKHFTENTYLFHCPITMNFKAKDRTNKEFNNHVLEVLNKNPDIKVIGLDRGERHLLYLSLINQKGEIECQKTLNLVEQVRNDKTVSVNYHEKLVHKEGSRDAARKNWQTIGNIKELKEGYLSAVVHEIASLMVKHNAIVVMEDLNFGFKRGRFAVERQIYQKFENMLIEKLNYLVFKDRKVTEPGGVLNAYQLANKSAKVTDVYKQCGWLFYIPAAYTSKIDPRTGFANLFITKGLTNVEKKKEFFGKFDSIRYDATESCFVFSFDYAKICDNADYKKKWDVYTRGTRLVYNKTERKNVSVNPTEELQCVFDEFGIKWNTGEDLIESISLIPAEKSNAKFFDVLLRMFNATLQMRNSVPNTDTDYLVSPVKAEDGSFFDSREEFKKGGDARLPIDCDANGAYHIALKGLYLLLNDFNRDNKGVIQNISNKDWFKFVQEKVYKDX

SEQ ID NO: 787 - protein, 1294 aa, synthetic construct
  VARIANT 1294: note = Any amino acid
MARIIDEFCGQMNGYTRSITLRNRLVPIGKTEENLKQFLEKDLERATAYPDIKNLIDAIHRNVIEDTLSKVALNWNEIFNILATYQNEKDKKKKAAIKKDLEKLQSGARKKIVEAFKKNPDFEKLFKEGLFKELLPELIKSAPVDEIAVKTKALECFNRFSTYFTGFHDNRKNMYSEEAKSTAISYRIVNENFPKFFANIKLFNYLKEHFPRIIIDTEESLKDYLKGKKLDSVFSIDGFNSVLAQSGIDFYNTVIGGISGEAGTKKTQGLNEKINLARQQLSKEEKNKLRGKMVVLFKQILSDRETSSFIPVGFANKEEVYSTVKEFNNSIAEKAVSKVRDLFLHREEFTLNEIFVPAKSLTDFSQAIFGSWSILSEGLFLLEKDSMKKALSESQEEKINKEIAKKDCSFTELQLAYERYCTEHNLPVEKFCKDYFDIVDYRGNGAKSEKTKVSILSEILETFLQLDFDHIQDLQQEKNAAIPIKAYLDEVQNLYHHLKLVDYRGEEQKDSTFYSKHDEILTDLSQIVPLYNKVRNFVTKKLGESKKIKLNFDCPTLANGWDENQESSNDAIILRKDGKYYLGIYNPNNKPKFAKKDSIVGDCYEKMAYKQIALPMGLGAFVRKCFGTAQKYGWGCPENCLNSEGKIIIKDEEAKGNLEAIIDCYKDFLNKYEKDGFKYKDYNFSFLDSASYEKLSDFFNDVKPQGYKLSFTSIPLSEIDMMIDEGKLFLFQIYNKDFAKKATGKKNLHTLYWENLFSVENLQDVVLKLNGEAELFWREASIKKDKVIVHKKGSILVNRTTTDGKSIPEAIYQEIYQLKNKMADSISDEAKRLLESGTVVCKVATHDIVKDKHFTENTYLFHCPITMNFKAKDRTNKEFNNHVLEVLNKNPDIKVIGLDRGERHLLYLSLINQKGEIECQKTLNLVEQVRNDKTVSVNYHEKLVHKEGSRDAARKNWQTIGNIKELKEGYLSAVVHEIASLMVKHNAIVVMEDLNFGFKRGRFAVERQIYQKFENMLIEKLNYLVFKDRKVTEPGGVLNAYQLANKSAKVTDVYKQCGWLFYIPAAYTSKIDPRTGFANLFITKGLTNVEKKKEFFGKFDSIRYDATESCFVFSFDYAKICDNADYKKKWDVYTRGTRLVYNKTERKNVSVNPTEELQCVFDEFGIKWNTGEDLIESISLIPAEKSNAKFFDVLLRMFNATLQMRNSVPNTDTDYLVSPVKAEDGSFFDSREEFKKGGDARLPIDCDANGAYHIALKGLYLLLNDFNRDNKGVIQNISNKDWFKFVQEKVYKDX

SEQ ID NO: 788 - protein, 1294 aa, synthetic construct
  VARIANT 1294: note = Any amino acid
MARIIDEFCGQMNGYTRSITLRNRLVPIGKTEENLKQFLEKDLERATAYPDIKNLIDAIHRNVIEDTLSKVALNWNEIFNILATYQNEKDKKKKAAIKKDLEKLQSGARKKIVEAFKKNPDFEKLFKEGLFKELLPELIKSAPVDEIAVKTKALECFNRFSTYFTGFHDNRKNMYSEEAKSTAISYRIVNENFPKFFANIKLFNYLKEHFPRIIIDTEESLKDYLKGKKLDSVFSIDGFNSVLAQSGIDFYNTVIGGISGEAGTKKTQGLNEKINLARQQLSKEEKNKLRGKMVVLFKQILSDRETSSFIPVGFANKEEVYSTVKEFNNSIAEKAVSKVRDLFLHREEFTLNEIFVPAKSLTDFSQAIFGSWSILSEGLFLLEKDSMKKALSESQEEKINKEIAKKDCSFTELQLAYERYCTEHNLPVEKFCKDYFDIVDYRGNGAKSEKTKVSILSEILETFLQLDFDHIQDLQQEKNAAIPIKAYLDEVQNLYHHLKLVDYRGEEQKDSTFYSKHDEILTDLSQIVPLYNKVRNFVTKKLGESKKIKLNFDCPTLANGWDENQESSNDAIILRKDGKYYLGIYNPNNKPKFAKKDSIVGDCYEKMAYKQIALPMGLGAFVRKCFGTAQKYGWGCPENCLNSEGKIIIKDEEAKGNLEAIIDCYKDFLNKYEKDGFKYKDYNFSFLDSASYEKLSDFFNDVKPQGYKLSFTSIPLSEIDKMIDEGKLFLFQIYNKDFAKKATGKKNLHTLYWENLFSVENLQDVVLKLNGEAELFWREASIKKDKVIVHKKGSILVNRTTTDGKSIPEVIYQEIYQLKNKMADSISDEAKRLLESGTVVCKVATHDIVKDKHFTENTYLFHCPITMNFKAKDRTNKEFNNHVLEVLNKNPDIKVIGLDRGERHLLYLSLINQKGEIECQKTLNLVEQVRNDKTVSVNYHEKLVHKEGSRDAARKNWQTIGNIKELKEGYLSAVVHEIASLMVKHNAIVVMEDLNFGFKRGRFAVERQIYQKFENMLIEKLNYLVFKDRKVTEPGGVLNAYQLANKSAKVTDVYKQCGWLFYIPAAYTSKIDPRTGFANLFITKGLTNVEKKKEFFGKFDSIRYDATESCFVFSFDYAKICDNADYKKKWDVYTRGTRLVYNKTERKNVSVNPTEELQCVFDEFGIKWNTGEDLIESISLIPAEKSNAKFFDVLLRMFNATLQMRNSVPNTDTDYLVSPVKAEDGSFFDSREEFKKGGDARLPIDCDANGAYHIALKGLYLLLNDFNRDNKGVIQNISNKDWFKFVQEKVYKDX

SEQ ID NO: 789 - protein, 1294 aa, synthetic construct
  VARIANT 1294: note = Any amino acid
MARIIDEFCGQMNGYTRSITLRNRLVPIGKTEENLKQFLEKDLERATAYPDIKNLIDAIHRNVIEDTLSKVALNWNEIFNILATYQNEKDKKKKAAIKKDLEKLQSGARKKIVEAFKKNPDFEKLFKEGLFKELLPELIKSAPVDEIAVKTKALECFNRFSTYFTGFHDNRKNMYSEEAKSTAISYRIVNENFPKFFANIKLFNYLKEHFPRIIIDTEESLKDYLKGKKLDSVFSIDGFNSVLAQSGIDFYNTVIGGISGEAGTKKTQGLNEKINLARQQLSKEEKNKLRGKMVVLFKQILSDRETSSFIPVGFANKEEVYSTVKEFNNSIAEKAVSKVRDLFLHREEFTLNEIFVPAKSLTDFSQAIFGSWSILSEGLFLLEKDSMKKALSESQEEKINKEIAKKDCSFTELQLAYERYCTEHNLPVEKFCKDYFDIVDYRGNGAKSEKTKVSILSEILETFLQLDFDHIQDLQQEKNAAIPIKAYLDEVQNLYHHLKLVDYRGEEQKDSTFYSKHDEILTDLSQIVPLYNKVRNFVTKKLGESKKIKLNFDCPTLANGWDENQESSNDAIILRKDGKYYLGIYNPNNKPKFAKKDSIVGDCYEKMAYKQIALPMGLGAFVRKCFGTAQKYGWGCPENCLNSEGKIIIKDEEAKGNLEAIIDCYKDFLNKYEKDGFKYKDYNFSFLDSASYEKLSDFFNDVKPQGYKLSFTSIPLSEIDKMIDEGKLFLFQIYNKDFAKKATGKKNLHTLYWENLFSVENLQDVVLMLNGEAELFWREASIKKDKVIVHKKGSILVNRTTTDGKSIPEAIYQEIYQLKNKMADSISDEAKRLLESGTVVCKVATHDIVKDKHFTENTYLFHCPITMNFKAKDRTNKEFNNHVLEVLNKNPDIKVIGLDRGERHLLYLSLINQKGEIECQKTLNLVEQVRNDKTVSVNYHEKLVHKEGSRDAARKNWQTIGNIKELKEGYLSAVVHEIASLMVKHNAIVVMEDLNFGFKRGRFAVERQIYQKFENMLIEKLNYLVFKDRKVTEPGGVLNAYQLANKSAKVTDVYKQCGWLFYIPAAYTSKIDPRTGFANLFITKGLTNVEKKKEFFGKFDSIRYDATESCFVFSFDYAKICDNADYKKKWDVYTRGTRLVYNKTERKNVSVNPTEELQCVFDEFGIKWNTGEDLIESISLIPAEKSNAKFFDVLLRMFNATLQMRNSVPNTDTDYLVSPVKAEDGSFFDSREEFKKGGDARLPIDCDANGAYHIALKGLYLLLNDFNRDNKGVIQNISNKDWFKFVQEKVYKDX

SEQ ID NO: 790 - protein, 1294 aa, synthetic construct
  VARIANT 1294: note = Any amino acid
MARIIDEFCGQMNGYTRSITLRNRLVPIGKTEENLKQFLEKDLERATAYPDIKNLIDAIHRNVIEDTLSKVALNWNEIFNILATYQNEKDKKKKAAIKKDLEKLQSGARKKIVEAFKKNPDFEKLFKEGLFKELLPELIKSAPVDEIAVKTKALECFNRFSTYFTGFHDNRKNMYSEEAKSTAISYRIVNENFPKFFANIKLFNYLKEHFPRIIIDTEESLKDYLKGKKLDSVFSIDGFNSVLAQSGIDFYNTVIGGISGEAGTKKTQGLNEKINLARQQLSKEEKNKLRGKMVVLFKQILSDRETSSFIPVGFANKEEVYSTVKEFNNSIAEKAVSKVRDLFLHREEFTLNEIFVPAKSLTDFSQAIFGSWSILSEGLFLLEKDSMKKALSESQEEKINKEIAKKDCSFTELQLAYERYCTEHNLPVEKFCKDYFDIVDYRGNGAKSEKTKVSILSEILETFLQLDFDHIQDLQQEKNAAIPIKAYLDEVQNLYHHLKLVDYRGEEQKDSTFYSKHDEILTDLSQIVPLYNKVRNFVTKKLGESKKIKLNFDCPTLANGWDENQESSNDAIILRKDGKYYLGIYNPNNKPKFAKKDSIVGDCYEKMAYKQIALPMGLGAFVRKCFGTAQKYGWGCPENCLNSEGKIIIKDEEAKGNLEAIIDCYKDFLNKYEKDGFKYKDYNFSFLDSASYEKLSDFFNDVKPQGYKLSFTSIPLSEIDKMIDEGKLFLFQIYNKDFAKKATGKKNLHTLYWENLFSVENLQDVVLKLNGEAELFWREARIKKDKVIVHKKGSILVNRTTTDGKSIPEAIYQEIYQLKNKMADSISDEAKRLLESGTVVCKVATHDIVKDKHFTENTYLFHCPITMNFKAKDRTNKEFNNHVLEVLNKNPDIKVIGLDRGERHLLYLSLINQKGEIECQKTLNLVEQVRNDKTVSVNYHEKLVHKEGSRDAARKNWQTIGNIKELKEGYLSAVVHEIASLMVKHNAIVVMEDLNFGFKRGRFAVERQIYQKFENMLIEKLNYLVFKDRKVTEPGGVLNAYQLANKSAKVTDVYKQCGWLFYIPAAYTSKIDPRTGFANLFITKGLTNVEKKKEFFGKFDSIRYDATESCFVFSFDYAKICDNADYKKKWDVYTRGTRLVYNKTERKNVSVNPTEELQCVFDEFGIKWNTGEDLIESISLIPAEKSNAKFFDVLLRMFNATLQMRNSVPNTDTDYLVSPVKAEDGSFFDSREEFKKGGDARLPIDCDANGAYHIALKGLYLLLNDFNRDNKGVIQNISNKDWFKFVQEKVYKDX

SEQ ID NO: 791 - protein, 1294 aa, synthetic construct
  VARIANT 1294: note = Any amino acid
MARIIDEFCGQMNGYTRSITLRNRLVPIGKTEENLKQFLEKDLERATAYPDIKNLIDAIHRNVIEDTLSKVALNWNEIFNILATYQNEKDKKKKAAIKKDLEKLQSGARKKIVEAFKKNPDFEKLFKEGLFKELLPELIKSAPVDEIAVKTKALECFNRFSTYFTGFHDNRKNMYSEEAKSTAISYRIVNENFPKFFANIKLFNYLKEHFPRIIIDTEESLKDYLKGKKLDSVFSIDGFNSVLAQSGIDFYNTVIGGISGEAGTKKTQGLNEKINLARQQLSKEEKNKLRGKMVVLFKQILSDRETSSFIPVGFANKEEVYSTVKEFNNSIAEKAVSKVRDLFLHREEFTLNEIFVPAKSLTDFSQAIFGSWSILSEGLFLLEKDSMKKALSESQEEKINKEIAKKDCSFTELQLAYERYCTEHNLPVEKFCKDYFDIVDYRGNGAKSEKTKVSILSEILETFLQLDFDHIQDLQQEKNAAIPIKAYLDEVQNLYHHLKLVDYRGEEQKDSTFYSKHDEILTDLSQIVPLYNKVRNFVTKKLGESKKIKLNFDCPTLANGWDENQESSNDAIILRKDGKYYLGIYNPNNKPKFAKKDSIVGDCYEKMAYKQIALPMGLGAFVRKCFGTAQKYGWGCPENCLNSEGKIIIKDEEAKGNLEAIIDCYKDFLNKYEKDGFKYKDYNFSFLDSASYEKLSDFFNDVKPQGYKLSFTSIPLSEIDKMIDDGKLFLFQIYNKDFAKKATGKKNLHTLYWENLFSVENLQDVVLKLNGEAELFWREASIKKDKVIVHKKGSILVNRTTTDGKSIPEAIYQEIYQLKNKMADSISDEAKRLLESGTVVCKVATHDIVKDKHFTENTYLFHCPITMNFKAKDRTNKEFNNHVLEVLNKNPDIKVIGLDRGERHLLYLSLINQKGEIECQKTLNLVEQVRNDKTVSVNYHEKLVHKEGSRDAARKNWQTIGNIKELKEGYLSAVVHEIASLMVKHNAIVVMEDLNFGFKRGRFAVERQIYQKFENMLIEKLNYLVFKDRKVTEPGGVLNAYQLANKSAKVTDVYKQCGWLFYIPAAYTSKIDPRTGFANLFITKGLTNVEKKKEFFGKFDSIRYDATESCFVFSFDYAKICDNADYKKKWDVYTRGTRLVYNKTERKNVSVNPTEELQCVFDEFGIKWNTGEDLIESISLIPAEKSNAKFFDVLLRMFNATLQMRNSVPNTDTDYLVSPVKAEDGSFFDSREEFKKGGDARLPIDCDANGAYHIALKGLYLLLNDFNRDNKGVIQNISNKDWFKFVQEKVYKDX

SEQ ID NO: 792 - protein, 1294 aa, synthetic construct
  VARIANT 1294: note = Any amino acid
MARIIDEFCGQMNGYTRSITLRNRLVPIGKTEENLKQFLEKDLERATAYPDIKNLIDAIHRNVIEDTLSKVALNWNEIFNILATYQNEKDKKKKAAIKKDLEKLQSGARKKIVEAFKKNPDFEKLFKEGLFKELLPELIKSAPVDEIAVKTKALECFNRFSTYFTGFHDNRKNMYSEEAKSTAISYRIVNENFPKFFANIKLFNYLKEHFPRIIIDTEESLKDYLKGKKLDSVFSIDGFNSVLAQSGIDFYNTVIGGISGEAGTKKTQGLNEKINLARQQLSKEEKNKLRGKMVVLFKQILSDRETSSFIPVGFANKEEVYSTVKEFNNSIAEKAVSKVRDLFLHREEFTLNEIFVPAKSLTDFSQAIFGSWSILSEGLFLLEKDSMKKALSESQEEKINKEIAKKDCSFTELQLAYERYCTEHNLPVEKFCKDYFDIVDYRGNGAKSEKTKVSILSEILETFLQLDFDHIQDLQQEKNAAIPIKAYLDEVQNLYHHLKLVDYRGEEQKDSTFYSKHDEILTDLSQIVPLYNKVRNFVTKKLGESKKIKLNFDCPTLANGWDENQESSNDAIILRKDGKYYLGIYNPNNKPKFAKKDSIVGDCYEKMAYKQIALPMGLGAFVRKCFGTAQKYGWGCPENCLNSEGKIIIKDEEAKGNLEAIIDCYKDFLNKYEKDGFKYKDYNFSFLDSASYEKLSDFFNDVKPQGYKLSFTSIPLSEIDKMIDEGKLFSFQIYNKDFAKKATGKKNLHTLYWENLFSVENLQDVVLKLNGEAELFWREASIKKDKVIVHKKGSILVNRTTTDGKSIPEAIYQEIYQLKNKMADSISDEAKRLLESGTVVCKVATHDIVKDKHFTENTYLFHCPITMNFKAKDRTNKEFNNHVLEVLNKNPDIKVIGLDRGERHLLYLSLINQKGEIECQKTLNLVEQVRNDKTVSVNYHEKLVHKEGSRDAARKNWQTIGNIKELKEGYLSAVVHEIASLMVKHNAIVVMEDLNFGFKRGRFAVERQIYQKFENMLIEKLNYLVFKDRKVTEPGGVLNAYQLANKSAKVTDVYKQCGWLFYIPAAYTSKIDPRTGFANLFITKGLTNVEKKKEFFGKFDSIRYDATESCFVFSFDYAKICDNADYKKKWDVYTRGTRLVYNKTERKNVSVNPTEELQCVFDEFGIKWNTGEDLIESISLIPAEKSNAKFFDVLLRMFNATLQMRNSVPNTDTDYLVSPVKAEDGSFFDSREEFKKGGDARLPIDCDANGAYHIALKGLYLLLNDFNRDNKGVIQNISNKDWFKFVQEKVYKDX

SEQ ID NO: 793 - DNA, 3882 bp, synthetic construct
  source 1..3882: mol_type = other DNA
atggctaggataattgatgaattttgtggacagatgaatggatacagccgttccatcacgctgcgtaaccgcctggtgccgatcggcaagaccgaggaaaatctgaaacagtttctggagaaggacttagagcgcgcaactgcgtacccggacatcaaaaacctgattgacgctatccatcgtaatgtcattgaggacaccttaagcaaagtggccctgaactggaacgaaatctttaatatcctcgcgacgtaccagaacgaaaaagataaaaagaaaaaggcggcgatcaaaaaggacctggagaagctccaaagcggtgcacgtaaaaagattgttgaggcattcaaaaagaacccggattttgaaaaactgttcaaagagggtctgtttaaagagttgctgcctgaactgatcaaaagcgcaccggttgatgaaatcgcggttaaaaccaaggcgctggaatgcttcaaccgttttagcacctatttcacgggtttccacgacaatcgcaaaaacatgtactcggaagaagctaaatctaccgcaattagctatcgcatcgtgaacgaaaatttcccgaaattttttgccaatatcaagttgttcaactatctgaaagagcactttccgcgaatcatcattgataccgaagagtccctgaaagactatttgaagggcaaaaagctggattctgtatttagcattgacggctttaacagcgtgctggcgcagagcgggattgatttctataacaccgtgataggcggtatttcaggtgaggccggcaccaaaaaaacgcagggtcttaacgagaagattaacttagcgcgccagcaattatccaaggaggagaagaacaagctgcgcggtaaaatggtggtgctgtttaaacagatcttgtctgatcgtgaaaccagcagctttatcccagtgggttttgccaacaaggaggaggtgtactctacggtgaaagaattcaacaactcgattgccgaaaaggcggtgtccaaggtgcgtgatctattcctgcaccgcgaagaattcacgctaaacgagattttcgtcccggcaaagagcttgaccgacttcagtcaggccatcttcggatcctggtctattttgagtgagggcctgttcctgctggagaaggacagcatgaaaaaggctctaagcgaatcccaagaagaaaagatcaataaggagattgcgaaaaaagactgctcctttaccgaactacaactggcgtacgagcgctactgcaccgagcacaacttgccggttgaaaaattctgcaaagactacttcgacatcgtcgattacaggggaaacggtgcgaaaagcgaaaaaacaaaagtgagcatcctgagcgaaatcctggaaacctttttacaattggactttgaccacattcaggacctgcaacaagaaaagaacgctgcgattcctatcaaagcatatcttgacgaagttcagaatttgtaccaccacctgaagttggtcgattatcgtggcgaagagcagaaagactcaaccttttatagcaaacacgatgaaatcctgaccgatctttctcagatcgtcccattgtataataaagtccgtaactttgttaccaaaaaactgggtgagagcaaaaagatcaagctgaacttcgattgcccgactctggctaatggctgggatgagaataaagagtccagcaacgatgcaattatcctgagaaaggacggcaaatactatctgggcatttacaacccgaacaacaaaccgaaattcgcgaagaaggacagcatcgtgggtgattgctatgaaaaaatggcatacaagcaaatcgcactgccgatgggtttgggtgcatttgtgcgcaaatgctttggcaccgctcagaaatacggttggggttgcccggagaattgcctgaacagcgagggtaaaattatcatcaaagacgaggaggcgaagggtaatctggaggcaatcatcgactgttacaaagattttctgaacaagtacgaaaaggacggcttcaagtacaaggactacaatttttccttcctggactctgccagctatgaaaaactgtctgatttcttcaacgacgttaaaccgcagggctataagctgagctttacgtccatcccactgtcagagatcgataagatgattgatgaaggtaaactgtttttgtttcagatatataacaaagacttcgcgaagaaggcgacggggaagaagaacctgcataccctttattgggaaaacctattctcagtcgagaatctgcaagatgtggtgttgaagctcaatggcgaagccgagctgttctggcgtgaggctagcatcaaaaaggacaaggtgatcgttcacaaaaaaggttctattctggtgaatcgtaccaccacggatggtaagagcatcccggaggccatttatcaagaaatctatcaattaaaaaacaaaatggcggattccatcagcgacgaagcgaaacgccttctagagtccggcaccgttgtctgtaaagtcgccactcatgatatcgttaaggataaacattttactgaaaacacgtatctgttccattgtccgattaccatgaacttcaaggcaaaagaccgtaccaataaggaatttaacaatcatgttctggaggttcttaacaagaatccggatattaaggtgatcggcttagaccgtggcgaacgtcatctgctgtacctgagcctgatcaatcagaagggtgaaattgagtgccagaaaacgctgaacctagttgagcaagttcgtaatgataagaccgtttccgttaattatcatgaaaaactggtgcacaaagaaggcagccgtgatgctgcgagaaaaaactggcagaccattggcaatattaaagagctgaaggagggctacctgtcggcggtggtgcacgagattgcgagtctgatggtaaagcacaatgcgatcgttgtaatggaagacctgaatttcggctttaagcgcggtcgttttgctgtggagcgtcagatctaccaaaagttcgaaaacatgctgattgagaagctgaactatctggtttttaaagaccgtaaagtgacggagccgggtggcgttctgaacgcgtaccagttggcgaacaagagcgcgaaggtgacagatgtttataaacaatgcggttggctgttctatatcccggcagcgtacaccagcaaaattgatccgcgtaccggtttcgcgaatctgttcattaccaagggtctgaccaatgttgagaagaagaaggagtttttcggcaagttcgactcgattcgttatgatgcgaccgagtcttgtttcgttttttccttcgactacgcaaagatttgtgacaatgctgattacaagaagaaatgggatgtttacacccgtggtactcgtctcgtttacaacaagaccgaacgcaagaacgtgagcgtcaacccaaccgaagagttgcagtgtgtttttgatgagttcggcatcaagtggaataccggcgaagacctgattgaatctattagcctgatcccggcggaaaagtccaacgcgaagttcttcgacgttttgttgcgtatgtttaacgcgactcttcagatgagaaacagcgtgccgaataccgacaccgactacttggtcagcccggtgaaagctgaagacggcagctttttcgacagccgcgaggagtttaagaaaggtggcgatgcccgcctgccgatagactgcgatgctaatggtgcgtaccatattgccctgaaaggcttgtacttgttgttgaatgatttcaaccgtgataacaagggcgtcatccaaaacatctctaacaaggactggtttaaattcgtgcaggagaaagtttacaaagactaa

SEQ ID NO: 794 - DNA, 3882 bp, synthetic construct
  source 1..3882: mol_type = other DNA
atggctaggataattgatgaattttgtggacagatgaatggatacagccgttccatcacgctgcgtaaccgcctggtgccgatcggcaagaccgaggaaaatctgaaacagtttctggagaaggacttagagcgcgcaactgcgtacccggacatcaaaaacctgattgacgctatccatcgtaatgtcattgaggacaccttaagcaaagtggccctgaactggaacgaaatctttaatatcctcgcgacgtaccagaacgaaaaagataaaaagaaaaaggcggcgatcaaaaaggacctggagaagctccaaagcggtgcacgtaaaaagattgttgaggcattcaaaaagaacccggattttgaaaaactgttcaaagagggtctgtttaaagagttgctgcctgaactgatcaaaagcgcaccggttgatgaaatcgcggttaaaaccaaggcgctggaatgcttcaaccgttttagcacctatttcacgggtttccacgacaatcgcaaaaacatgtactcggaagaagctaaatctaccgcaattagctatcgcatcgtgaacgaaaatttcccgaaattttttgccaatatcaagttgttcaactatctgaaagagcactttccgcgaatcatcattgataccgaagagtccctgaaagactatttgaagggcaaaaagctggattctgtatttagcattgacggctttaacagcgtgctggcgcagagcgggattgatttctataacaccgtgataggcggtatttcaggtgaggccggcaccaaaaaaacgcagggtcttaacgagaagattaacttagcgcgccagcaattatccaaggaggagaagaacaagctgcgcggtaaaatggtggtgctgtttaaacagatcttgtctgatcgtgaaaccagcagctttatcccagtgggttttgccaacaaggaggaggtgtactctacggtgaaagaattcaacaactcgattgccgaaaaggcggtgtccaaggtgcgtgatctattcctgcaccgcgaagaattcacgctaaacgagattttcgtcccggcaaagagcttgaccgacttcagtcaggccatcttcggatcctggtctattttgagtgagggcctgttcctgctggagaaggacagcatgaaaaaggctctaagcgaatcccaagaagaaaagatcaataaggagattgcgaaaaaagactgctcctttaccgaactacaactggcgtacgagcgctactgcaccgagcacaacttgccggttgaaaaattctgcaaagactacttcgacatcgtcgattacaggggaaacggtgcgaaaagcgaaaaaacaaaagtgagcatcctgagcgaaatcctggaaacctttttacaattggactttgaccacattcaggacctgcaacaagaaaagaacgctgcgattcctatcaaagcatatcttgacgaagttcagaatttgtaccaccacctgaagttggtcgattatcgtggcgaagagcagaaagactcaaccttttatagcaaacacgatgaaatcctgaccgatctttctcagatcgtcccattgtataataaagtccgtaactttgttaccaaaaaactgggtgagagcaaaaagatcaagctgaacttcgattgcccgactctggctaatggctgggatgagaatcaagagtccagcaacgatgcaattatcctgagaaaggacggcaaatactatctgggcatttacaacccgatcaacaaaccgaaattcgcgaagaaggacagcatcgtgggtgattgctatgaaaaaatggcatacaagcaaatcgcactgccgatgggtttgggtgcatttgtgcgcaaatgctttggcaccgctcagaaatacggttggggttgcccggagaattgcctgaacagcgagggtaaaattatcatcaaagacgaggaggcgaagggtaatctggaggcaatcatcgactgttacaaagattttctgaacaagtacgaaaaggacggcttcaagtacaaggactacaatttttccttcctggactctgccagctatgaaaaactgtctgatttcttcaacgacgttaaaccgcagggctataagctgagctttacgtccatcccactgtcagagatcgataagatgattgatgaaggtaaactgtttttgtttcagatatataacaaagacttcgcgaagaaggcgacggggaagaagaacctgcataccctttattgggaaaacctattctcagtcgagaatctgcaagatgtggtgttgaagctcaatggcgaagccgagctgttctggcgtgaggctagcatcaaaaaggacaaggtgatcgttcacaaaaaaggttctattctggtgaatcgtaccaccacggatggtaagagcatcccggaggccatttatcaagaaatctatcaattaaaaaacaaaatggcggattccatcagcgacgaagcgaaacgccttctagagtccggcaccgttgtctgtaaagtcgccactcatgatatcgttaaggataaacattttactgaaaacacgtatctgttccattgtccgattaccatgaacttcaaggcaaaagaccgtaccaataaggaatttaacaatcatgttctggaggttcttaacaagaatccggatattaaggtgatcggcttagaccgtggcgaacgtcatctgctgtacctgagcctgatcaatcagaagggtgaaattgagtgccagaaaacgctgaacctagttgagcaagttcgtaatgataagaccgtttccgttaattatcatgaaaaactggtgcacaaagaaggcagccgtgatgctgcgagaaaaaactggcagaccattggcaatattaaagagctgaaggagggctacctgtcggcggtggtgcacgagattgcgagtctgatggtaaagcacaatgcgatcgttgtaatggaagacctgaatttcggctttaagcgcggtcgttttgctgtggagcgtcagatctaccaaaagttcgaaaacatgctgattgagaagctgaactatctggtttttaaagaccgtaaagtgacggagccgggtggcgttctgaacgcgtaccagttggcgaacaagagcgcgaaggtgacagatgtttataaacaatgcggttggctgttctatatcccggcagcgtacaccagcaaaattgatccgcgtaccggtttcgcgaatctgttcattaccaagggtctgaccaatgttgagaagaagaaggagtttttcggcaagttcgactcgattcgttatgatgcgaccgagtcttgtttcgttttttccttcgactacgcaaagatttgtgacaatgctgattacaagaagaaatgggatgtttacacccgtggtactcgtctcgtttacaacaagaccgaacgcaagaacgtgagcgtcaacccaaccgaagagttgcagtgtgtttttgatgagttcggcatcaagtggaataccggcgaagacctgattgaatctattagcctgatcccggcggaaaagtccaacgcgaagttcttcgacgttttgttgcgtatgtttaacgcgactcttcagatgagaaacagcgtgccgaataccgacaccgactacttggtcagcccggtgaaagctgaagacggcagctttttcgacagccgcgaggagtttaagaaaggtggcgatgcccgcctgccgatagactgcgatgctaatggtgcgtaccatattgccctgaaaggcttgtacttgttgttgaatgatttcaaccgtgataacaagggcgtcatccaaaacatctctaacaaggactggtttaaattcgtgcaggagaaagtttacaaagactaa

SEQ ID NO: 795 - DNA, 3882 bp, synthetic construct
  source 1..3882: mol_type = other DNA
atggctaggataattgatgaattttgtggacagatgaatggatacagccgttccatcacgctgcgtaaccgcctggtgccgatcggcaagaccgaggaaaatctgaaacagtttctggagaaggacttagagcgcgcaactgcgtacccggacatcaaaaacctgattgacgctatccatcgtaatgtcattgaggacaccttaagcaaagtggccctgaactggaacgaaatctttaatatcctcgcgacgtaccagaacgaaaaagataaaaagaaaaaggcggcgatcaaaaaggacctggagaagctccaaagcggtgcacgtaaaaagattgttgaggcattcaaaaagaacccggattttgaaaaactgttcaaagagggtctgtttaaagagttgctgcctgaactgatcaaaagcgcaccggttgatgaaatcgcggttaaaaccaaggcgctggaatgcttcaaccgttttagcacctatttcacgggtttccacgacaatcgcaaaaacatgtactcggaagaagctaaatctaccgcaattagctatcgcatcgtgaacgaaaatttcccgaaattttttgccaatatcaagttgttcaactatctgaaagagcactttccgcgaatcatcattgataccgaagagtccctgaaagactatttgaagggcaaaaagctggattctgtatttagcattgacggctttaacagcgtgctggcgcagagcgggattgatttctataacaccgtgataggcggtatttcaggtgaggccggcaccaaaaaaacgcagggtcttaacgagaagattaacttagcgcgccagcaattatccaaggaggagaagaacaagctgcgcggtaaaatggtggtgctgtttaaacagatcttgtctgatcgtgaaaccagcagctttatcccagtgggttttgccaacaaggaggaggtgtactctacggtgaaagaattcaacaactcgattgccgaaaaggcggtgtccaaggtgcgtgatctattcctgcaccgcgaagaattcacgctaaacgagattttcgtcccggcaaagagcttgaccgacttcagtcaggccatcttcggatcctggtctattttgagtgagggcctgttcctgctggagaaggacagcatgaaaaaggctctaagcgaatcccaagaagaaaagatcaataaggagattgcgaaaaaagactgctcctttaccgaactacaactggcgtacgagcgctactgcaccgagcacaacttgccggttgaaaaattctgcaaagactacttcgacatcgtcgattacaggggaaacggtgcgaaaagcgaaaaaacaaaagtgagcatcctgagcgaaatcctggaaacctttttacaattggactttgaccacattcaggacctgcaacaagaaaagaacgctgcgattcctatcaaagcatatcttgacgaagttcagaatttgtaccaccacctgaagttggtcgattatcgtggcgaagagcagaaagactcaaccttttatagcaaacacgatgaaatcctgaccgatctttctcagatcgtcccattgtataataaagtccgtaactttgttaccaaaaaactgggtgagagcaaaaagatcaagctgaacttcgattgcccgactctggctaatggctgggatgagaatcaagagtccagcaacgatgcaattatcctgagaaaggacggcaaatactatctgggcagttacaacccgaacaacaaaccgaaattcgcgaagaaggacagcatcgtgggtgattgctatgaaaaaatggcatacaagcaaatcgcactgccgatgggtttgggtgcatttgtgcgcaaatgctttggcaccgctcagaaatacggttggggttgcccggagaattgcctgaacagcgagggtaaaattatcatcaaagacgaggaggcgaagggtaatctggaggcaatcatcgactgttacaaagattttctgaacaagtacgaaaaggacggcttcaagtacaaggactacaatttttccttcctggactctgccagctatgaaaaactgtctgatttcttcaacgacgttaaaccgcagggctataagctgagctttacgtccatcccactgtcagagatcgataagatgattgatgaaggtaaactgtttttgtttcagatatataacaaagacttcgcgaagaaggcgacggggaagaagaacctgcataccctttattgggaaaacctattctcagtcgagaatctgcaagatgtggtgttgaagctcaatggcgaagccgagctgttctggcgtgaggctagcatcaaaaaggacaaggtgatcgttcacaaaaaaggttctattctggtgaatcgtaccaccacggatggtaagagcatcccggaggccatttatcaagaaatctatcaattaaaaaacaaaatggcggattccatcagcgacgaagcgaaacgccttctagagtccggcaccgttgtctgtaaagtcgccactcatgatatcgttaaggataaacattttactgaaaacacgtatctgttccattgtccgattaccatgaacttcaaggcaaaagaccgtaccaataaggaatttaacaatcatgttctggaggttcttaacaagaatccggatattaaggtgatcggcttagaccgtggcgaacgtcatctgctgtacctgagcctgatcaatcagaagggtgaaattgagtgccagaaaacgctgaacctagttgagcaagttcgtaatgataagaccgtttccgttaattatcatgaaaaactggtgcacaaagaaggcagccgtgatgctgcgagaaaaaactggcagaccattggcaatattaaagagctgaaggagggctacctgtcggcggtggtgcacgagattgcgagtctgatggtaaagcacaatgcgatcgttgtaatggaagacctgaatttcggctttaagcgcggtcgttttgctgtggagcgtcagatctaccaaaagttcgaaaacatgctgattgagaagctgaactatctggtttttaaagaccgtaaagtgacggagccgggtggcgttctgaacgcgtaccagttggcgaacaagagcgcgaaggtgacagatgtttataaacaatgcggttggctgttctatatcccggcagcgtacaccagcaaaattgatccgcgtaccggtttcgcgaatctgttcattaccaagggtctgaccaatgttgagaagaagaaggagtttttcggcaagttcgactcgattcgttatgatgcgaccgagtcttgtttcgttttttccttcgactacgcaaagatttgtgacaatgctgattacaagaagaaatgggatgtttacacccgtggtactcgtctcgtttacaacaagaccgaacgcaagaacgtgagcgtcaacccaaccgaagagttgcagtgtgtttttgatgagttcggcatcaagtggaataccggcgaagacctgattgaatctattagcctgatcccggcggaaaagtccaacgcgaagttcttcgacgttttgttgcgtatgtttaacgcgactcttcagatgagaaacagcgtgccgaataccgacaccgactacttggtcagcccggtgaaagctgaagacggcagctttttcgacagccgcgaggagtttaagaaaggtggcgatgcccgcctgccgatagactgcgatgctaatggtgcgtaccatattgccctgaaaggcttgtacttgttgttgaatgatttcaaccgtgataacaagggcgtcatccaaaacatctctaacaaggactggtttaaattcgtgcaggagaaagtttacaaagactaa

SEQ ID NO: 796 - DNA, 3882 bp, synthetic construct
  source 1..3882: mol_type = other DNA
atggctaggataattgatgaattttgtggacagatgaatggatacagccgttccatcacgctgcgtaaccgcctggtgccgatcggcaagaccgaggaaaatctgaaacagtttctggagaaggacttagagcgcgcaactgcgtacccggacatcaaaaacctgattgacgctatccatcgtaatgtcattgaggacaccttaagcaaagtggccctgaactggaacgaaatctttaatatcctcgcgacgtaccagaacgaaaaagataaaaagaaaaaggcggcgatcaaaaaggacctggagaagctccaaagcggtgcacgtaaaaagattgttgaggcattcaaaaagaacccggattttgaaaaactgttcaaagagggtctgtttaaagagttgctgcctgaactgatcaaaagcgcaccggttgatgaaatcgcggttaaaaccaaggcgctggaatgcttcaaccgttttagcacctatttcacgggtttccacgacaatcgcaaaaacatgtactcggaagaagctaaatctaccgcaattagctatcgcatcgtgaacgaaaatttcccgaaattttttgccaatatcaagttgttcaactatctgaaagagcactttccgcgaatcatcattgataccgaagagtccctgaaagactatttgaagggcaaaaagctggattctgtatttagcattgacggctttaacagcgtgctggcgcagagcgggattgatttctataacaccgtgataggcggtatttcaggtgaggccggcaccaaaaaaacgcagggtcttaacgagaagattaacttagcgcgccagcaattatccaaggaggagaagaacaagctgcgcggtaaaatggtggtgctgtttaaacagatcttgtctgatcgtgaaaccagcagctttatcccagtgggttttgccaacaaggaggaggtgtactctacggtgaaagaattcaacaactcgattgccgaaaaggcggtgtccaaggtgcgtgatctattcctgcaccgcgaagaattcacgctaaacgagattttcgtcccggcaaagagcttgaccgacttcagtcaggccatcttcggatcctggtctattttgagtgagggcctgttcctgctggagaaggacagcatgaaaaaggctctaagcgaatcccaagaagaaaagatcaataaggagattgcgaaaaaagactgctcctttaccgaactacaactggcgtacgagcgctactgcaccgagcacaacttgccggttgaaaaattctgcaaagactacttcgacatcgtcgattacaggggaaacggtgcgaaaagcgaaaaaacaaaagagagcatcctgagcgaaatcctggaaacctttttacaattggactttgaccacattcaggacctgcaacaagaaaagaacgctgcgattcctatcaaagcatatcttgacgaagttcagaatttgtaccaccacctgaagttggtcgattatcgtggcgaagagcagaaagactcaaccttttatagcaaacacgatgaaatcctgaccgatctttctcagatcgtcccattgtataataaagtccgtaactttgttaccaaaaaactgggtgagagcaaaaagatcaagctgaacttcgattgcccgactctggctaatggctgggatgagaatcaagagtccagcaacgatgcaattatcctgagaaaggacggcaaatactatctgggcatttacaacccgaacaacaaaccgaaattcgcgaagaaggacagcatcgtgggtgattgctatgaaaaaatggcatacaagcaaatcgcactgccgatgggtttgggtgcatttgtgcgcaaatgctttggcaccgctcagaaatacggttggggttgcccggagaattgcctgaacagcgagggtaaaattatcatcaaagacgaggaggcgaagggtaatctggaggcaatcatcgactgttacaaagattttctgaacaagtacgaaaaggacggcttcaagtacaaggactacaatttttccttcctggactctgccagctatgaaaaactgtctgatttcttcaacgacgttaaaccgcagggctataagctgagctttacgtccatcccactgtcagagatcgataagatgattgatgaaggtaaactgtttttgtttcagatatataacaaagacttcgcgaagaaggcgacggggaagaagaacctgcataccctttattgggaaaacctattctcagtcgagaatctgcaagatgtggtgttgaagctcaatggcgaagccgagctgttctggcgtgaggctagcatcaaaaaggacaaggtgatcgttcacaaaaaaggttctattctggtgaatcgtaccaccacggatggtaagagcatcccggaggccatttatcaagaaatctatcaattaaaaaacaaaatggcggattccatcagcgacgaagcgaaacgccttctagagtccggcaccgttgtctgtaaagtcgccactcatgatatcgttaaggataaacattttactgaaaacacgtatctgttccattgtccgattaccatgaacttcaaggcaaaagaccgtaccaataaggaatttaacaatcatgttctggaggttcttaacaagaatccggatattaaggtgatcggcttagaccgtggcgaacgtcatctgctgtacctgagcctgatcaatcagaagggtgaaattgagtgccagaaaacgctgaacctagttgagcaagttcgtaatgataagaccgtttccgttaattatcatgaaaaactggtgcacaaagaaggcagccgtgatgctgcgagaaaaaactggcagaccattggcaatattaaagagctgaaggagggctacctgtcggcggtggtgcacgagattgcgagtctgatggtaaagcacaatgcgatcgttgtaatggaagacctgaatttcggctttaagcgcggtcgttttgctgtggagcgtcagatctaccaaaagttcgaaaacatgctgattgagaagctgaactatctggtttttaaagaccgtaaagtgacggagccgggtggcgttctgaacgcgtaccagttggcgaacaagagcgcgaaggtgacagatgtttataaacaatgcggttggctgttctatatcccggcagcgtacaccagcaaaattgatccgcgtaccggtttcgcgaatctgttcattaccaagggtctgaccaatgttgagaagaagaaggagtttttcggcaagttcgactcgattcgttatgatgcgaccgagtcttgtttcgttttttccttcgactacgcaaagatttgtgacaatgctgattacaagaagaaatgggatgtttacacccgtggtactcgtctcgtttacaacaagaccgaacgcaagaacgtgagcgtcaacccaaccgaagagttgcagtgtgtttttgatgagttcggcatcaagtggaataccggcgaagacctgattgaatctattagcctgatcccggcggaaaagtccaacgcgaagttcttcgacgttttgttgcgtatgtttaacgcgactcttcagatgagaaacagcgtgccgaataccgacaccgactacttggtcagcccggtgaaagctgaagacggcagctttttcgacagccgcgaggagtttaagaaaggtggcgatgcccgcctgccgatagactgcgatgctaatggtgcgtaccatattgccctgaaaggcttgtacttgttgttgaatgatttcaaccgtgataacaagggcgtcatccaaaacatctctaacaaggactggtttaaattcgtgcaggagaaagtttacaaagactaa

SEQ ID NO: 797 - DNA, 3882 bp, synthetic construct
  source 1..3882: mol_type = other DNA
atggctaggataattgatgaattttgtggacagatgaatggatacagccgttccatcacgctgcgtaaccgcctggtgccgatcggcaagaccgaggaaaatctgaaacagtttctggagaaggacttagagcgcgcaactgcgtacccggacatcaaaaacctgattgacgctatccatcgtaatgtcattgaggacaccttaagcaaagtggccctgaactggaacgaaatctttaatatcctcgcgacgtaccagaacgaaaaagataaaaagaaaaaggcggcgatcaaaaaggacctggagaagctccaaagcggtgcacgtaaaaagattgttgaggcattcaaaaagaacccggattttgaaaaactgttcaaagagggtctgtttaaagagttgctgcctgaactgatcaaaagcgcaccggttgatgaaatcgcggttaaaaccaaggcgctggaatgcttcaaccgttttagcacctatttcacgggtttccacgacaatcgcaaaaacatgtactcggaagaagctaaatctaccgcaattagctatcgcatcgtgaacgaaaatttcccgaaattttttgccaatatcaagttgttcaactatctgaaagagcactttccgcgaatcatcattgataccgaagagtccctgaaagactatttgaagggcaaaaagctggattctgtatttagcattgacggctttaacagcgtgctggcgcagagcgggattgatttctataacaccgtgataggcggtatttcaggtgaggccggcaccaaaaaaacgcagggtcttaacgagaagattaacttagcgcgccagcaattatccaaggaggagaagaacaagctgcgcggtaaaatggtggtgctgtttaaacagatcttgtctgatcgtgaaaccagcagctttatcccagtgggttttgccaacaaggaggaggtgtactctacggtgaaagaattcaacaactcgattgccgaaaaggcggtgtccaaggtgcgtgatctattcctgcaccgcgaagaattcacgctaaacgagattttcgtcccggcaaagagcttgaccgacttcagtcaggccatcttcggatcctggtctattttgagtgagggcctgttcctgctggagaaggacagcatgaaaaaggctctaagcgaatcccaagaagaaaagatcaataaggagattgcgaaaaaagactgctcctttaccgaactacaactggcgtacgagcgctactgcaccgagcacaacttgccggttgaaaaattctgcaaagactacttcgacatcgtcgattacaggggaaacggtgcgaaaagcgaaaaaacaaaagtgagcatcctgagcgaaatcctggaaacctttttacaattggactttgaccacattcaggacctgcatcaagaaaagaacgctgcgattcctatcaaagcatatcttgacgaagttcagaatttgtaccaccacctgaagttggtcgattatcgtggcgaagagcagaaagactcaaccttttatagcaaacacgatgaaatcctgaccgatctttctcagatcgtcccattgtataataaagtccgtaactttgttaccaaaaaactgggtgagagcaaaaagatcaagctgaacttcgattgcccgactctggctaatggctgggatgagaatcaagagtccagcaacgatgcaattatcctgagaaaggacggcaaatactatctgggcatttacaacccgaacaacaaaccgaaattcgcgaagaaggacagcatcgtgggtgattgctatgaaaaaatggcatacaagcaaatcgcactgccgatgggtttgggtgcatttgtgcgcaaatgctttggcaccgctcagaaatacggttggggttgcccggagaattgcctgaacagcgagggtaaaattatcatcaaagacgaggaggcgaagggtaatctggaggcaatcatcgactgttacaaagattttctgaacaagtacgaaaaggacggcttcaagtacaaggactacaatttttccttcctggactctgccagctatgaaaaactgtctgatttcttcaacgacgttaaaccgcagggctataagctgagctttacgtccatcccactgtcagagatcgataagatgattgatgaaggtaaactgtttttgtttcagatatataacaaagacttcgcgaagaaggcgacggggaagaagaacctgcataccctttattgggaaaacctattctcagtcgagaatctgcaagatgtggtgttgaagctcaatggcgaagccgagctgttctggcgtgaggctagcatcaaaaaggacaaggtgatcgttcacaaaaaaggttctattctggtgaatcgtaccaccacggatggtaagagcatcccggaggccatttatcaagaaatctatcaattaaaaaacaaaatggcggattccatcagcgacgaagcgaaacgccttctagagtccggcaccgttgtctgtaaagtcgccactcatgatatcgttaaggataaacattttactgaaaacacgtatctgttccattgtccgattaccatgaacttcaaggcaaaagaccgtaccaataaggaatttaacaatcatgttctggaggttcttaacaagaatccggatattaaggtgatcggcttagaccgtggcgaacgtcatctgctgtacctgagcctgatcaatcagaagggtgaaattgagtgccagaaaacgctgaacctagttgagcaagttcgtaatgataagaccgtttccgttaattatcatgaaaaactggtgcacaaagaaggcagccgtgatgctgcgagaaaaaactggcagaccattggcaatattaaagagctgaaggagggctacctgtcggcggtggtgcacgagattgcgagtctgatggtaaagcacaatgcgatcgttgtaatggaagacctgaatttcggctttaagcgcggtcgttttgctgtggagcgtcagatctaccaaaagttcgaaaacatgctgattgagaagctgaactatctggtttttaaagaccgtaaagtgacggagccgggtggcgttctgaacgcgtaccagttggcgaacaagagcgcgaaggtgacagatgtttataaacaatgcggttggctgttctatatcccggcagcgtacaccagcaaaattgatccgcgtaccggtttcgcgaatctgttcattaccaagggtctgaccaatgttgagaagaagaaggagtttttcggcaagttcgactcgattcgttatgatgcgaccgagtcttgtttcgttttttccttcgactacgcaaagatttgtgacaatgctgattacaagaagaaatgggatgtttacacccgtggtactcgtctcgtttacaacaagaccgaacgcaagaacgtgagcgtcaacccaaccgaagagttgcagtgtgtttttgatgagttcggcatcaagtggaataccggcgaagacctgattgaatctattagcctgatcccggcggaaaagtccaacgcgaagttcttcgacgttttgttgcgtatgtttaacgcgactcttcagatgagaaacagcgtgccgaataccgacaccgactacttggtcagcccggtgaaagctgaagacggcagctttttcgacagccgcgaggagtttaagaaaggtggcgatgcccgcctgccgatagactgcgatgctaatggtgcgtaccatattgccctgaaaggcttgtacttgttgttgaatgatttcaaccgtgataacaagggcgtcatccaaaacatctctaacaaggactggtttaaattcgtgcaggagaaagtttacaaagactaa

SEQ ID NO: 798 - DNA, 3882 bp, synthetic construct
  source 1..3882: mol_type = other DNA
atggctaggataattgatgaattttgtggacagatgaatggatacagccgttccatcacgctgcgtaaccgcctggtgccgatcggcaagaccgaggaaaatctgaaacagtttctggagaaggacttagagcgcgcaactgcgtacccggacatcaaaaacctgattgacgctatccatcgtaatgtcattgaggacaccttaagcaaagtggccctgaactggaacgaaatctttaatatcctcgcgacgtaccagaacgaaaaagataaaaagaaaaaggcggcgatcaaaaaggacctggagaagctccaaagcggtgcacgtaaaaagattgttgaggcattcaaaaagaacccggattttgaaaaactgttcaaagagggtctgtttaaagagttgctgcctgaactgatcaaaagcgcaccggttgatgaaatcgcggttaaaaccaaggcgctggaatgcttcaaccgttttagcacctatttcacgggtttccacgacaatcgcaaaaacatgtactcggaagaagctaaatctaccgcaattagctatcgcatcgtgaacgaaaatttcccgaaattttttgccaatatcaagttgttcaactatctgaaagagcactttccgcgaatcatcattgataccgaagagtccctgaaagactatttgaagggcaaaaagctggattctgtatttagcattgacggctttaacagcgtgctggcgcagagcgggattgatttctataacaccgtgataggcggtatttcaggtgaggccggcaccaaaaaaacgcagggtcttaacgagaagattaacttagcgcgccagcaattatccaaggaggagaagaacaagctgcgcggtaaaatggtggtgctgtttaaacagatcttgtctgatcgtgaaaccagcagctttatcccagtgggttttgccaacaaggaggaggtgtactctacggtgaaagaattcaacaactcgattgccgaaaaggcggtgtccaaggtgcgtgatctattcctgcaccgcgaagaattcacgctaaacgagattttcgtcccggcaaagagcttgaccgacttcagtcaggccatcttcggatcctggtctattttgagtgagggcctgttcctgctggagaaggacagcatgaaaaaggctctaagcgaatcccaagaagaaaagatcagtaaggagattgcgaaaaaagactgctcctttaccgaactacaactggcgtacgagcgctactgcaccgagcacaacttgccggttgaaaaattctgcaaagactacttcgacatcgtcgattacaggggaaacggtgcgaaaagcgaaaaaacaaaagtgagcatcctgagcgaaatcctggaaacctttttacaattggactttgaccacattcaggacctgcaacaagaaaagaacgctgcgattcctatcaaagcatatcttgacgaagttcagaatttgtaccaccacctgaagttggtcgattatcgtggcgaagagcagaaagactcaaccttttatagcaaacacgatgaaatcctgaccgatctttctcagatcgtcccattgtataataaagtccgtaactttgttaccaaaaaactgggtgagagcaaaaagatcaagctgaacttcgattgcccgactctggctaatggctgggatgagaatcaagagtccagcaacgatgcaattatcctgagaaaggacggcaaatactatctgggcatttacaacccgaacaacaaaccgaaattcgcgaagaaggacagcatcgtgggtgattgctatgaaaaaatggcatacaagcaaatcgcactgccgatgggtttgggtgcatttgtgcgcaaatgctttggcaccgctcagaaatacggttggggttgcccggagaattgcctgaacagcgagggtaaaattatcatcaaagacgaggaggcgaagggtaatctggaggcaatcatcgactgttacaaagattttctgaacaagtacgaaaaggacggcttcaagtacaaggactacaatttttccttcctggactctgccagctatgaaaaactgtctgatttcttcaacgacgttaaaccgcagggctataagctgagctttacgtccatcccactgtcagagatcgataagatgattgatgaaggtaaactgtttttgtttcagatatataacaaagacttcgcgaagaaggcgacggggaagaagaacctgcataccctttattgggaaaacctattctcagtcgagaatctgcaagatgtggtgttgaagctcaatggcgaagccgagctgttctggcgtgaggctagcatcaaaaaggacaaggtgatcgttcacaaaaaaggttctattctggtgaatcgtaccaccacggatggtaagagcatcccggaggccatttatcaagaaatctatcaattaaaaaacaaaatggcggattccatcagcgacgaagcgaaacgccttctagagtccggcaccgttgtctgtaaagtcgccactcatgatatcgttaaggataaacattttactgaaaacacgtatctgttccattgtccgattaccatgaacttcaaggcaaaagaccgtaccaataaggaatttaacaatcatgttctggaggttcttaacaagaatccggatattaaggtgatcggcttagaccgtggcgaacgtcatctgctgtacctgagcctgatcaatcagaagggtgaaattgagtgccagaaaacgctgaacctagttgagcaagttcgtaatgataagaccgtttccgttaattatcatgaaaaactggtgcacaaagaaggcagccgtgatgctgcgagaaaaaactggcagaccattggcaatattaaagagctgaaggagggctacctgtcggcggtggtgcacgagattgcgagtctgatggtaaagcacaatgcgatcgttgtaatggaagacctgaatttcggctttaagcgcggtcgttttgctgtggagcgtcagatctaccaaaagttcgaaaacatgctgattgagaagctgaactatctggtttttaaagaccgtaaagtgacggagccgggtggcgttctgaacgcgtaccagttggcgaacaagagcgcgaaggtgacagatgtttataaacaatgcggttggctgttctatatcccggcagcgtacaccagcaaaattgatccgcgtaccggtttcgcgaatctgttcattaccaagggtctgaccaatgttgagaagaagaaggagtttttcggcaagttcgactcgattcgttatgatgcgaccgagtcttgtttcgttttttccttcgactacgcaaagatttgtgacaatgctgattacaagaagaaatgggatgtttacacccgtggtactcgtctcgtttacaacaagaccgaacgcaagaacgtgagcgtcaacccaaccgaagagttgcagtgtgtttttgatgagttcggcatcaagtggaataccggcgaagacctgattgaatctattagcctgatcccggcggaaaagtccaacgcgaagttcttcgacgttttgttgcgtatgtttaacgcgactcttcagatgagaaacagcgtgccgaataccgacaccgactacttggtcagcccggtgaaagctgaagacggcagctttttcgacagccgcgaggagtttaagaaaggtggcgatgcccgcctgccgatagactgcgatgctaatggtgcgtaccatattgccctgaaaggcttgtacttgttgttgaatgatttcaaccgtgataacaagggcgtcatccaaaacatctctaacaaggactggtttaaattcgtgcaggagaaagtttacaaagactaa

SEQ ID NO: 799 - DNA, 3882 bp, synthetic construct
  source 1..3882: mol_type = other DNA
atggctaggataattgatgaattttgtggacagatgaatggatacagccgttccatcacgctgcgtaaccgcctggtgccgatcggcaagaccgaggaaaatctgaaacagtttctggagaaggacttagagcgcgcaactgcgtacccggacatcaaaaacctgattgacgctatccatcgtaatgtcattgaggacaccttaagcaaagtggccctgaactggaacgaaatctttaatatcctcgcgacgtaccagaacgaaaaagataaaaagaaaaaggcggcgatcaaaaaggacctggagaagctccaaagcggtgcacgtaaaaagattgttgaggcattcaaaaagaacccggattttgaaaaactgttcaaagagggtctgtttaaagagttgctgcctgaactgatcaaaagcgcaccggttgatgaaatcgcggttaaaaccaaggcgctggaatgcttcaaccgttttagcacctatttcacgggtttccacgacaatcgcaaaaacatgtactcggaagaagctaaatctaccgcaattagctatcgcatcgtgaacgaaaatttcccgaaattttttgccaatatcaagttgttcaactatctgaaagagcactttccgcgaatcatcattgataccgaagagtccctgaaagactatttgaagggcaaaaagctggattctgtatttagcattgacggctttaacagcgtgctggcgcagagcgggattgatttctataacaccgtgataggcggtatttcaggtgaggccggcaccaaaaaaacgcagggtcttaacgagaagattaacttagcgcgccagcaattatccaaggaggagaagaacaagctgcgcggtaaaatggtggtgctgtttaaacagatcttgtctgatcgtgaaaccagcagctttatcccagtgggttttgccaacaaggaggaggtgtactctacggtgaaagaattcaacaactcgattgccgaaaaggcggtgtccaaggtgcgtgatctattcctgcaccgcgaagaattcacgctaaacgagattttcgtcccggcaaagagcttgaccgacttcagtcaggccatcttcggatcctggtctattttgagtgagggcctgttcctgctggagaaggacagcatgaaaaaggctctaagcgaatcccaagaagaaaagatcaataaggagattgcgaaaaaagactgctcctttaccgaactacaactggcgtacgagcgctactgcaccgagcacaacttgccggttgaaaaattctgcaaagactacttcgacatcgtcgattacaggggaaacggtgcgaaaagcgaaaaaacaaaagtgagcatcctgagcgaaatcctggaaacctttttacaattggactttgaccacaatcaggacctgcaacaagaaaagaacgctgcgattcctatcaaagcatatcttgacgaagttcagaatttgtaccaccacctgaagttggtcgattatcgtggcgaagagcagaaagactcaaccttttatagcaaacacgatgaaatcctgaccgatctttctcagatcgtcccattgtataataaagtccgtaactttgttaccaaaaaactgggtgagagcaaaaagatcaagctgaacttcgattgcccgactctggctaatggctgggatgagaatcaagagtccagcaacgatgcaattatcctgagaaaggacggcaaatactatctgggcatttacaacccgaacaacaaaccgaaattcgcgaagaaggacagcatcgtgggtgattgctatgaaaaaatggcatacaagcaaatcgcactgccgatgggtttgggtgcatttgtgcgcaaatgctttggcaccgctcagaaatacggttggggttgcccggagaattgcctgaacagcgagggtaaaattatcatcaaagacgaggaggcgaagggtaatctggaggcaatcatcgactgttacaaagattttctgaacaagtacgaaaaggacggcttcaagtacaaggactacaatttttccttcctggactctgccagctatgaaaaactgtctgatttcttcaacgacgttaaaccgcagggctataagctgagctttacgtccatcccactgtcagagatcgataagatgattgatgaaggtaaactgtttttgtttcagatatataacaaagacttcgcgaagaaggcgacggggaagaagaacctgcataccctttattgggaaaacctattctcagtcgagaatctgcaagatgtggtgttgaagctcaatggcgaagccgagctgttctggcgtgaggctagcatcaaaaaggacaaggtgatcgttcacaaaaaaggttctattctggtgaatcgtaccaccacggatggtaagagcatcccggaggccatttatcaagaaatctatcaattaaaaaacaaaatggcggattccatcagcgacgaagcgaaacgccttctagagtccggcaccgttgtctgtaaagtcgccactcatgatatcgttaaggataaacattttactgaaaacacgtatctgttccattgtccgattaccatgaacttcaaggcaaaagaccgtaccaataaggaatttaacaatcatgttctggaggttcttaacaagaatccggatattaaggtgatcggcttagaccgtggcgaacgtcatctgctgtacctgagcctgatcaatcagaagggtgaaattgagtgccagaaaacgctgaacctagttgagcaagttcgtaatgataagaccgtttccgttaattatcatgaaaaactggtgcacaaagaaggcagccgtgatgctgcgagaaaaaactggcagaccattggcaatattaaagagctgaaggagggctacctgtcggcggtggtgcacgagattgcgagtctgatggtaaagcacaatgcgatcgttgtaatggaagacctgaatttcggctttaagcgcggtcgttttgctgtggagcgtcagatctaccaaaagttcgaaaacatgctgattgagaagctgaactatctggtttttaaagaccgtaaagtgacggagccgggtggcgttctgaacgcgtaccagttggcgaacaagagcgcgaaggtgacagatgtttataaacaatgcggttggctgttctatatcccggcagcgtacaccagcaaaattgatccgcgtaccggtttcgcgaatctgttcattaccaagggtctgaccaatgttgagaagaagaaggagtttttcggcaagttcgactcgattcgttatgatgcgaccgagtcttgtttcgttttttccttcgactacgcaaagatttgtgacaatgctgattacaagaagaaatgggatgtttacacccgtggtactcgtctcgtttacaacaagaccgaacgcaagaacgtgagcgtcaacccaaccgaagagttgcagtgtgtttttgatgagttcggcatcaagtggaataccggcgaagacctgattgaatctattagcctgatcccggcggaaaagtccaacgcgaagttcttcgacgttttgttgcgtatgtttaacgcgactcttcagatgagaaacagcgtgccgaataccgacaccgactacttggtcagcccggtgaaagctgaagacggcagctttttcgacagccgcgaggagtttaagaaaggtggcgatgcccgcctgccgatagactgcgatgctaatggtgcgtaccatattgccctgaaaggcttgtacttgttgttgaatgatttcaaccgtgataacaagggcgtcatccaaaacatctctaacaaggactggtttaaattcgtgcaggagaaagtttacaaagactaa

SEQ ID NO: 800 - DNA, 3882 bp, synthetic construct
  source 1..3882: mol_type = other DNA
atggctaggataattgatgaattttgtggacagatgaatggatacagccgttccatcacgctgcgtaaccgcctggtgccgatcggcaagaccgaggaaaatctgaaacagtttctggagaaggacttagagcgcgcaactgcgtacccggacatcaaaaacctgattgacgctatccatcgtaatgtcattgaggacaccttaagcaaagtggccctgaactggaacgaaatctttaatatcctcgcgacgtaccagaacgaaaaagataaaaagaaaaaggcggcgatcaaaaaggacctggagaagctccaaagcggtgcacgtaaaaagattgttgaggcattcaaaaagaacccggattttgaaaaactgttcaaagagggtctgtttaaagagttgctgcctgaactgatcaaaagcgcaccggttgatgaaatcgcggttaaaaccaaggcgctggaatgcttcaaccgttttagcacctatttcacgggtttccacgacaatcgcaaaaacatgtactcggaagaagctaaatctaccgcaattagctatcgcatcgtgaacgaaaatttcccgaaattttttgccaatatcaagttgttcaactatctgaaagagcactttccgcgaatcatcattgataccgaagagtccctgaaagactatttgaagggcaaaaagctggattctgtatttagcattgacggctttaacagcgtgctggcgcagagcgggattgatttctataacaccgtgataggcggtatttcaggtgaggccggcaccaaaaaaacgcagggtcttaacgagaagattaacttagcgcgccagcaattatccaaggaggagaagaacaagctgcgcggtaaaatggtggtgctgtttaaacagatcttgtctgatcgtgaaaccagcagctttatcccagtgggttttgccaacaaggaggaggtgtactctacggtgaaagaattcaacaactcgattgccgaaaaggcggtgtccaaggtgcgtgatctattcctgcaccgcgaagaattcacgctaaacgagattttcgtcccggcaaagagcttgaccgacttcagtcaggccatcttcggatcctggtctattttgagtgagggcctgttcctgctggagaaggacagcatgaaaaaggctctaagcgaatcccaagaagaaaagatcaataaggagattgcgaaaaaagactgctcctttaccgaactacaactggcgtacgagcgctactgcaccgagcacaacttgccggttgaaaaattctgcaaagactacttcgacatcgtcgattacaggggaaacggtgcgaaaagcgaaaaaacaaaagtgagcatcctgagcgaaatcctggaaacctttttacaattggactttgaccacattcaggacctgcaacaagaaaagaacgctgcgattcctatcaaagcatatcttgacgaagttcagaatttgtaccaccacctgaagttggtcgattatcgtggcgaagagcagaaagactcaaccttttatagcaaacacgatgaaatcctgaccgatctttctcagatcgtcccattgtataataaagtccgtaactttgttaccaaaaaactgggtgatagcaaaaagatcaagctgaacttcgattgcccgactctggctaatggctgggatgagaatcaagagtccagcaacgatgcaattatcctgagaaaggacggcaaatactatctgggcatttacaacccgaacaacaaaccgaaattcgcgaagaaggacagcatcgtgggtgattgctatgaaaaaatggcatacaagcaaatcgcactgccgatgggtttgggtgcatttgtgcgcaaatgctttggcaccgctcagaaatacggttggggttgcccggagaattgcctgaacagcgagggtaaaattatcatcaaagacgaggaggcgaagggtaatctggaggcaatcatcgactgttacaaagattttctgaacaagtacgaaaaggacggcttcaagtacaaggactacaatttttccttcctggactctgccagctatgaaaaactgtctgatttcttcaacgacgttaaaccgcagggctataagctgagctttacgtccatcccactgtcagagatcgataagatgattgatgaaggtaaactgtttttgtttcagatatataacaaagacttcgcgaagaaggcgacggggaagaagaacctgcataccctttattgggaaaacctattctcagtcgagaatctgcaagatgtggtgttgaagctcaatggcgaagccgagctgttctggcgtgaggctagcatcaaaaaggacaaggtgatcgttcacaaaaaaggttctattctggtgaatcgtaccaccacggatggtaagagcatcccggaggccatttatcaagaaatctatcaattaaaaaacaaaatggcggattccatcagcgacgaagcgaaacgccttctagagtccggcaccgttgtctgtaaagtcgccactcatgatatcgttaaggataaacattttactgaaaacacgtatctgttccattgtccgattaccatgaacttcaaggcaaaagaccgtaccaataaggaatttaacaatcatgttctggaggttcttaacaagaatccggatattaaggtgatcggcttagaccgtggcgaacgtcatctgctgtacctgagcctgatcaatcagaagggtgaaattgagtgccagaaaacgctgaacctagttgagcaagttcgtaatgataagaccgtttccgttaattatcatgaaaaactggtgcacaaagaaggcagccgtgatgctgcgagaaaaaactggcagaccattggcaatattaaagagctgaaggagggctacctgtcggcggtggtgcacgagattgcgagtctgatggtaaagcacaatgcgatcgttgtaatggaagacctgaatttcggctttaagcgcggtcgttttgctgtggagcgtcagatctaccaaaagttcgaaaacatgctgattgagaagctgaactatctggtttttaaagaccgtaaagtgacggagccgggtggcgttctgaacgcgtaccagttggcgaacaagagcgcgaaggtgacagatgtttataaacaatgcggttggctgttctatatcccggcagcgtacaccagcaaaattgatccgcgtaccggtttcgcgaatctgttcattaccaagggtctgaccaatgttgagaagaagaaggagtttttcggcaagttcgactcgattcgttatgatgcgaccgagtcttgtttcgttttttccttcgactacgcaaagatttgtgacaatgctgattacaagaagaaatgggatgtttacacccgtggtactcgtctcgtttacaacaagaccgaacgcaagaacgtgagcgtcaacccaaccgaagagttgcagtgtgtttttgatgagttcggcatcaagtggaataccggcgaagacctgattgaatctattagcctgatcccggcggaaaagtccaacgcgaagttcttcgacgttttgttgcgtatgtttaacgcgactcttcagatgagaaacagcgtgccgaataccgacaccgactacttggtcagcccggtgaaagctgaagacggcagctttttcgacagccgcgaggagtttaagaaaggtggcgatgcccgcctgccgatagactgcgatgctaatggtgcgtaccatattgccctgaaaggcttgtacttgttgttgaatgatttcaaccgtgataacaagggcgtcatccaaaacatctctaacaaggactggtttaaattcgtgcaggagaaagtttacaaagactaa

SEQ ID NO: 801 - DNA, 3882 bp, synthetic construct
  source 1..3882: mol_type = other DNA
atggctaggataattgatgaattttgtggacagatgaatggatacagccgttccatcacgctgcgtaaccgcctggtgccgatcggcaagaccgaggaaaatctgaaacagtttctggagaaggacttagagcgcgcaactgcgtacccggacatcaaaaacctgattgacgctatccatcgtaatgtcattgaggacaccttaagcaaagtggccctgaactggaacgaaatctttaatatcctcgcgacgtaccagaacgaaaaagataaaaagaaaaaggcggcgatcaaaaaggacctggagaagctccaaagcggtgcacgtaaaaagattgttgaggcattcaaaaagaacccggattttgaaaaactgttcaaagagggtctgtttaaagagttgctgcctgaactgatcaaaagcgcaccggttgatgaaatcgcggttaaaaccaaggcgctggaatgcttcaaccgttttagcacctatttcacgggtttccacgacaatcgcaaaaacatgtactcggaagaagctaaatctaccgcaattagctatcgcatcgtgaacgaaaatttcccgaaattttttgccaatatcaagttgttcaactatctgaaagagcactttccgcgaatcatcattgataccgaagagtccctgaaagactatttgaagggcaaaaagctggattctgtatttagcattgacggctttaacagcgtgctggcgcagagcgggattgatttctataacaccgtgataggcggtatttcaggtgaggccggcaccaaaaaaacgcagggtcttaacgagaagattaacttagcgcgccagcaattatccaaggaggagaagaacaagctgcgcggtaaaatggtggtgctgtttaaacagatcttgtctgatcgtgaaaccagcagctttatcccagtgggttttgccaacaaggaggaggtgtactctacggtgaaagaattcaacaactcgattgccgaaaaggcggtgtccaaggtgcgtgatctattcctgcaccgcgaagaattcacgctaaacgagattttcgtcccggcaaagagcttgaccgacttcagtcaggccatcttcggatcctggtctattttgagtgagggcctgttcctgctggagaaggacagcatgaaaaaggctctaagcgaatcccaagaagaaaagatcaataaggagattgcgaaaaaagactgctcctttaccgaactacaactggcgtacgagcgctactgcaccgagcacaacttgccggttgaaaaattctgcaaagactacttcgacatcgtcgattacaggggaaacggtgcgaaaagcgaaaaaacaaaagtgagcatcctgagcgaaatcctggaaacctttttacaattggactttgaccacattcaggacctgcaacaagaaaagaacgctgcgattcctatcaaagcatatcttgacgaagttcagaatttgtacaaccacctgaagttggtcgattatcgtggcgaagagcagaaagactcaaccttttatagcaaacacgatgaaatcctgaccgatctttctcagatcgtcccattgtataataaagtccgtaactttgttaccaaaaaactgggtgagagcaaaaagatcaagctgaacttcgattgcccgactctggctaatggctgggatgagaatcaagagtccagcaacgatgcaattatcctgagaaaggacggcaaatactatctgggcatttacaacccgaacaacaaaccgaaattcgcgaagaaggacagcatcgtgggtgattgctatgaaaaaatggcatacaagcaaatcgcactgccgatgggtttgggtgcatttgtgcgcaaatgctttggcaccgctcagaaatacggttggggttgcccggagaattgcctgaacagcgagggtaaaattatcatcaaagacgaggaggcgaagggtaatctggaggcaatcatcgactgttacaaagattttctgaacaagtacgaaaaggacggcttcaagtacaaggactacaatttttccttcctggactctgccagctatgaaaaactgtctgatttcttcaacgacgttaaaccgcagggctataagctgagctttacgtccatcccactgtcagagatcgataagatgattgatgaaggtaaactgtttttgtttcagatatataacaaagacttcgcgaagaaggcgacggggaagaagaacctgcataccctttattgggaaaacctattctcagtcgagaatctgcaagatgtggtgttgaagctcaatggcgaagccgagctgttctggcgtgaggctagcatcaaaaaggacaaggtgatcgttcacaaaaaaggttctattctggtgaatcgtaccaccacggatggtaagagcatcccggaggccatttatcaagaaatctatcaattaaaaaacaaaatggcggattccatcagcgacgaagcgaaacgccttctagagtccggcaccgttgtctgtaaagtcgccactcatgatatcgttaaggataaacattttactgaaaacacgtatctgttccattgtccgattaccatgaacttcaaggcaaaagaccgtaccaataaggaatttaacaatcatgttctggaggttcttaacaagaatccggatattaaggtgatcggcttagaccgtggcgaacgtcatctgctgtacctgagcctgatcaatcagaagggtgaaattgagtgccagaaaacgctgaacctagttgagcaagttcgtaatgataagaccgtttccgttaattatcatgaaaaactggtgcacaaagaaggcagccgtgatgctgcgagaaaaaactggcagaccattggcaatattaaagagctgaaggagggctacctgtcggcggtggtgcacgagattgcgagtctgatggtaaagcacaatgcgatcgttgtaatggaagacctgaatttcggctttaagcgcggtcgttttgctgtggagcgtcagatctaccaaaagttcgaaaacatgctgattgagaagctgaactatctggtttttaaagaccgtaaagtgacggagccgggtggcgttctgaacgcgtaccagttggcgaacaagagcgcgaaggtgacagatgtttataaacaatgcggttggctgttctatatcccggcagcgtacaccagcaaaattgatccgcgtaccggtttcgcgaatctgttcattaccaagggtctgaccaatgttgagaagaagaaggagtttttcggcaagttcgactcgattcgttatgatgcgaccgagtcttgtttcgttttttccttcgactacgcaaagatttgtgacaatgctgattacaagaagaaatgggatgtttacacccgtggtactcgtctcgtttacaacaagaccgaacgcaagaacgtgagcgtcaacccaaccgaagagttgcagtgtgtttttgatgagttcggcatcaagtggaataccggcgaagacctgattgaatctattagcctgatcccggcggaaaagtccaacgcgaagttcttcgacgttttgttgcgtatgtttaacgcgactcttcagatgagaaacagcgtgccgaataccgacaccgactacttggtcagcccggtgaaagctgaagacggcagctttttcgacagccgcgaggagtttaagaaaggtggcgatgcccgcctgccgatagactgcgatgctaatggtgcgtaccatattgccctgaaaggcttgtacttgttgttgaatgatttcaaccgtgataacaagggcgtcatccaaaacatctctaacaaggactggtttaaattcgtgcaggagaaagtttacaaagactaa

SEQ ID NO: 802 - DNA, 3882 bp, synthetic construct
  source 1..3882: mol_type = other DNA
atggctaggataattgatgaattttgtggacagatgaatggatacagccgttccatcacgctgcgtaaccgcctggtgccgatcggcaagaccgaggaaaatctgaaacagtttctggagaaggacttagagcgcgcaactgcgtacccggacatcaaaaacctgattgacgctatccatcgtaatgtcattgaggacaccttaagcaaagtggccctgaactggaacgaaatctttaatatcctcgcgacgtaccagaacgaaaaagataaaaagaaaaaggcggcgatcaaaaaggacctggagaagctccaaagcggtgcacgtaaaaagattgttgaggcattcaaaaagaacccggattttgaaaaactgttcaaagagggtctgtttaaagagttgctgcctgaactgatcaaaagcgcaccggttgatgaaatcgcggttaaaaccaaggcgctggaatgcttcaaccgttttagcacctatttcacgggtttccacgacaatcgcaaaaacatgtactcggaagaagctaaatctaccgcaattagctatcgcatcgtgaacgaaaatttcccgaaattttttgccaatatcaagttgttcaactatctgaaagagcactttccgcgaatcatcattgataccgaagagtccctgaaagactatttgaagggcaaaaagctggattctgtatttagcattgacggctttaacagcgtgctggcgcagagcgggattgatttctataacaccgtgataggcggtatttcaggtgaggccggcaccaaaaaaacgcagggtcttaacgagaagattaacttagcgcgccagcaattatccaaggaggagaagaacaagctgcgcggtaaaatggtggtgctgtttaaacagatcttgtctgatcgtgaaaccagcagctttatcccagtgggttttgccaacaaggaggaggtgtactctacggtgaaagaattcaacaactcgattgccgaaaaggcggtgtccaaggtgcgtgatctattcctgcaccgcgaagaattcacgctaaacgagattttcgtcccggcaaagagcttgaccgacttcagtcaggccatcttcggatcctggtctattttgagtgagggcctgttcctgctggagaaggacagcatgaaaaaggctctaagcgaatcccaagaagaaaagatcaataaggagattgcgaaaaaagactgctcctttaccgaactacaactggcgtacgagcgctactgcaccgagcacaacttgccggttgaaaaattctgcaaagactacttcgacatcgtcgattacaggggaaacggtgcgaaaagcgaaaaaacaaaagtgagcatcctgagcgaaatcctggaaacctttttacaattggactttgaccacattcaggacctgcaacaagaaaagaacgctgcgattcctatcaaagcatatcttgacgaagttcagaatttgtaccaccacctgaagttggtcgattatcgtggcgaagagcagaaagactcaaccttttatagcaaacacgatgaaatcctgaccgatctttctcagatcgtcccattgtataataaattccgtaactttgttaccaaaaaactgggtgagagcaaaaagatcaagctgaacttcgattgcccgactctggctaatggctgggatgagaatcaagagtccagcaacgatgcaattatcctgagaaaggacggcaaatactatctgggcatttacaacccgaacaacaaaccgaaattcgcgaagaaggacagcatcgtgggtgattgctatgaaaaaatggcatacaagcaaatcgcactgccgatgggtttgggtgcatttgtgcgcaaatgctttggcaccgctcagaaatacggttggggttgcccggagaattgcctgaacagcgagggtaaaattatcatcaaagacgaggaggcgaagggtaatctggaggcaatcatcgactgttacaaagattttctgaacaagtacgaaaaggacggcttcaagtacaaggactacaatttttccttcctggactctgccagctatgaaaaactgtctgatttcttcaacgacgttaaaccgcagggctataagctgagctttacgtccatcccactgtcagagatcgataagatgattgatgaaggtaaactgtttttgtttcagatatataacaaagacttcgcgaagaaggcgacggggaagaagaacctgcataccctttattgggaaaacctattctcagtcgagaatctgcaagatgtggtgttgaagctcaatggcgaagccgagctgttctggcgtgaggctagcatcaaaaaggacaaggtgatcgttcacaaaaaaggttctattctggtgaatcgtaccaccacggatggtaagagcatcccggaggccatttatcaagaaatctatcaattaaaaaacaaaatggcggattccatcagcgacgaagcgaaacgccttctagagtccggcaccgttgtctgtaaagtcgccactcatgatatcgttaaggataaacattttactgaaaacacgtatctgttccattgtccgattaccatgaacttcaaggcaaaagaccgtaccaataaggaatttaacaatcatgttctggaggttcttaacaagaatccggatattaaggtgatcggcttagaccgtggcgaacgtcatctgctgtacctgagcctgatcaatcagaagggtgaaattgagtgccagaaaacgctgaacctagttgagcaagttcgtaatgataagaccgtttccgttaattatcatgaaaaactggtgcacaaagaaggcagccgtgatgctgcgagaaaaaactggcagaccattggcaatattaaagagctgaaggagggctacctgtcggcggtggtgcacgagattgcgagtctgatggtaaagcacaatgcgatcgttgtaatggaagacctgaatttcggctttaagcgcggtcgttttgctgtggagcgtcagatctaccaaaagttcgaaaacatgctgattgagaagctgaactatctggtttttaaagaccgtaaagtgacggagccgggtggcgttctgaacgcgtaccagttggcgaacaagagcgcgaaggtgacagatgtttataaacaatgcggttggctgttctatatcccggcagcgtacaccagcaaaattgatccgcgtaccggtttcgcgaatctgttcattaccaagggtctgaccaatgttgagaagaagaaggagtttttcggcaagttcgactcgattcgttatgatgcgaccgagtcttgtttcgttttttccttcgactacgcaaagatttgtgacaatgctgattacaagaagaaatgggatgtttacacccgtggtactcgtctcgtttacaacaagaccgaacgcaagaacgtgagcgtcaacccaaccgaagagttgcagtgtgtttttgatgagttcggcatcaagtggaataccggcgaagacctgattgaatctattagcctgatcccggcggaaaagtccaacgcgaagttcttcgacgttttgttgcgtatgtttaacgcgactcttcagatgagaaacagcgtgccgaataccgacaccgactacttggtcagcccggtgaaagctgaagacggcagctttttcgacagccgcgaggagtttaagaaaggtggcgatgcccgcctgccgatagactgcgatgctaatggtgcgtaccatattgccctgaaaggcttgtacttgttgttgaatgatttcaaccgtgataacaagggcgtcatccaaaacatctctaacaaggactggtttaaattcgtgcaggagaaagtttacaaagactaa

SEQ ID NO: 803 - DNA, 3882 bp, synthetic construct
  source 1..3882: mol_type = other DNA
atggctaggataattgatgaattttgtggacagatgaatggatacagccgttccatcacgctgcgtaaccgcctggtgccgatcggcaagaccgaggaaaatctgaaacagtttctggagaaggacttagagcgcgcaactgcgtacccggacatcaaaaacctgattgacgctatccatcgtaatgtcattgaggacaccttaagcaaagtggccctgaactggaacgaaatctttaatatcctcgcgacgtaccagaacgaaaaagataaaaagaaaaaggcggcgatcaaaaaggacctggagaagctccaaagcggtgcacgtaaaaagattgttgaggcattcaaaaagaacccggattttgaaaaactgttcaaagagggtctgtttaaagagttgctgcctgaactgatcaaaagcgcaccggttgatgaaatcgcggttaaaaccaaggcgctggaatgcttcaaccgttttagcacctatttcacgggtttccacgacaatcgcaaaaacatgtactcggaagaagctaaatctaccgcaattagctatcgcatcgtgaacgaaaatttcccgaaattttttgccaatatcaagttgttcaactatctgaaagagcactttccgcgaatcatcattgataccgaagagtccctgaaagactatttgaagggcaaaaagctggattctgtatttagcattgacggctttaacagcgtgctggcgcagagcgggattgatttctataacaccgtgataggcggtatttcaggtgaggccggcaccaaaaaaacgcagggtcttaacgagaagattaacttagcgcgccagcaattatccaaggaggagaagaacaagctgcgcggtaaaatggtggtgctgtttaaacagatcttgtctgatcgtgaaaccagcagctttatcccagtgggttttgccaacaaggaggaggtgtactctacggtgaaagaattcaacaactcgattgccgaaaaggcggtgtccaaggtgcgtgatctattcctgcaccgcgaagaattcacgctaaacgagattttcgtcccggcaaagagcttgaccgacttcagtcaggccatcttcggatcctggtctattttgagtgagggcctgttcctgctggagaaggacagcatgaaaaaggctctaagcgaatcccaagaagaaaagatcaataaggagattgcgaaaaaagactgctcctttaccgaactacaactggcgtacgagcgctactgcaccgagcacaacttgccggttgaaaaattctgcaaagactacttcgacatcgtcgattacaggggaaacggtgcgaaaagcgaaaaaacaaaagtgagcatcctgagcgaaatcctggaaacctttttacaattggactttgaccacattcaggacctgcaacaagaaaagaacgctgcgattcctatcaaagcatatcttgacgaagttcagaatttgtaccaccacctgaagttggtcgattatcgtggcgaagagcagaaagactcaaccttttatagcaaacacgatgaaatcctgaccgatctttctcagatcgtcccattgtataataaagtccgtaactttgttaccaaaaaactgggtgagagcaaaaagatcaagctgaacttcgattgcccgactctggctaatggctgggatgagaatcaagagtccagcaacgatgcaattatcctgagaaagggcggcaaatactatctgggcatttacaacccgaacaacaaaccgaaattcgcgaagaaggacagcatcgtgggtgattgctatgaaaaaatggcatacaagcaaatcgcactgccgatgggtttgggtgcatttgtgcgcaaatgctttggcaccgctcagaaatacggttggggttgcccggagaattgcctgaacagcgagggtaaaattatcatcaaagacgaggaggcgaagggtaatctggaggcaatcatcgactgttacaaagattttctgaacaagtacgaaaaggacggcttcaagtacaaggactacaatttttccttcctggactctgccagctatgaaaaactgtctgatttcttcaacgacgttaaaccgcagggctataagctgagctttacgtccatcccactgtcagagatcgataagatgattgatgaaggtaaactgtttttgtttcagatatataacaaagacttcgcgaagaaggcgacggggaagaagaacctgcataccctttattgggaaaacctattctcagtcgagaatctgcaagatgtggtgttgaagctcaatggcgaagccgagctgttctggcgtgaggctagcatcaaaaaggacaaggtgatcgttcacaaaaaaggttctattctggtgaatcgtaccaccacggatggtaagagcatcccggaggccatttatcaagaaatctatcaattaaaaaacaaaatggcggattccatcagcgacgaagcgaaacgccttctagagtccggcaccgttgtctgtaaagtcgccactcatgatatcgttaaggataaacattttactgaaaacacgtatctgttccattgtccgattaccatgaacttcaaggcaaaagaccgtaccaataaggaatttaacaatcatgttctggaggttcttaacaagaatccggatattaaggtgatcggcttagaccgtggcgaacgtcatctgctgtacctgagcctgatcaatcagaagggtgaaattgagtgccagaaaacgctgaacctagttgagcaagttcgtaatgataagaccgtttccgttaattatcatgaaaaactggtgcacaaagaaggcagccgtgatgctgcgagaaaaaactggcagaccattggcaatattaaagagctgaaggagggctacctgtcggcggtggtgcacgagattgcgagtctgatggtaaagcacaatgcgatcgttgtaatggaagacctgaatttcggctttaagcgcggtcgttttgctgtggagcgtcagatctaccaaaagttcgaaaacatgctgattgagaagctgaactatctggtttttaaagaccgtaaagtgacggagccgggtggcgttctgaacgcgtaccagttggcgaacaagagcgcgaaggtgacagatgtttataaacaatgcggttggctgttctatatcccggcagcgtacaccagcaaaattgatccgcgtaccggtttcgcgaatctgttcattaccaagggtctgaccaatgttgagaagaagaaggagtttttcggcaagttcgactcgattcgttatgatgcgaccgagtcttgtttcgttttttccttcgactacgcaaagatttgtgacaatgctgattacaagaagaaatgggatgtttacacccgtggtactcgtctcgtttacaacaagaccgaacgcaagaacgtgagcgtcaacccaaccgaagagttgcagtgtgtttttgatgagttcggcatcaagtggaataccggcgaagacctgattgaatctattagcctgatcccggcggaaaagtccaacgcgaagttcttcgacgttttgttgcgtatgtttaacgcgactcttcagatgagaaacagcgtgccgaataccgacaccgactacttggtcagcccggtgaaagctgaagacggcagctttttcgacagccgcgaggagtttaagaaaggtggcgatgcccgcctgccgatagactgcgatgctaatggtgcgtaccatattgccctgaaaggcttgtacttgttgttgaatgatttcaaccgtgataacaagggcgtcatccaaaacatctctaacaaggactggtttaaattcgtgcaggagaaagtttacaaagactaa

SEQ ID NO: 804 - DNA, 3882 bp, synthetic construct
  source 1..3882: mol_type = other DNA
atggctaggataattgatgaattttgtggacagatgaatggatacagccgttccatcacgctgcgtaaccgcctggtgccgatcggcaagaccgaggaaaatctgaaacagtttctggagaaggacttagagcgcgcaactgcgtacccggacatcaaaaacctgattgacgctatccatcgtaatgtcattgaggacaccttaagcaaagtggccctgaactggaacgaaatctttaatatcctcgcgacgtaccagaacgaaaaagataaaaagaaaaaggcggcgatcaaaaaggacctggagaagctccaaagcggtgcacgtaaaaagattgttgaggcattcaaaaagaacccggattttgaaaaactgttcaaagagggtctgtttaaagagttgctgcctgaactgatcaaaagcgcaccggttgatgaaatcgcggttaaaaccaaggcgctggaatgcttcaaccgttttagcacctatttcacgggtttccacgacaatcgcaaaaacatgtactcggaagaagctaaatctaccgcaattagctatcgcatcgtgaacgaaaatttcccgaaattttttgccaatatcaagttgttcaactatctgaaagagcactttccgcgaatcatcattgataccgaagagtccctgaaagactatttgaagggcaaaaagctggattctgtatttagcattgacggctttaacagcgtgctggcgcagagcgggattgatttctataacaccgtgataggcggtatttcaggtgaggccggcaccaaaaaaacgcagggtcttaacgagaagattaacttagcgcgccagcaattatccaaggaggagaagaacaagctgcgcggtaaaatggtggtgctgtttaaacagatcttgtctgatcgtgaaaccagcagctttatcccagtgggttttgccaacaaggaggaggtgtactctacggtgaaagaattcaacaactcgattgccgaaaaggcggtgtccaaggtgcgtgatctattcctgcaccgcgaagaattcacgctaaacgagattttcgtcccggcaaagagcttgaccgacttcagtcaggccatcttcggatcctggtctattttgagtgagggcctgttcctgctggagaaggacagcatgaaaaaggctctaagcgaatcccaagaagaaaagatcaatatggagattgcgaaaaaagactgctcctttaccgaactacaactggcgtacgagcgctactgcaccgagcacaacttgccggttgaaaaattctgcaaagactacttcgacatcgtcgattacaggggaaacggtgcgaaaagcgaaaaaacaaaagtgagcatcctgagcgaaatcctggaaacctttttacaattggactttgaccacattcaggacctgcaacaagaaaagaacgctgcgattcctatcaaagcatatcttgacgaagttcagaatttgtaccaccacctgaagttggtcgattatcgtggcgaagagcagaaagactcaaccttttatagcaaacacgatgaaatcctgaccgatctttctcagatcgtcccattgtataataaagtccgtaactttgttaccaaaaaactgggtgagagcaaaaagatcaagctgaacttcgattgcccgactctggctaatggctgggatgagaatcaagagtccagcaacgatgcaattatcctgagaaaggacggcaaatactatctgggcatttacaacccgaacaacaaaccgaaattcgcgaagaaggacagcatcgtgggtgattgctatgaaaaaatggcatacaagcaaatcgcactgccgatgggtttgggtgcatttgtgcgcaaatgctttggcaccgctcagaaatacggttggggttgcccggagaattgcctgaacagcgagggtaaaattatcatcaaagacgaggaggcgaagggtaatctggaggcaatcatcgactgttacaaagattttctgaacaagtacgaaaaggacggcttcaagtacaaggactacaatttttccttcctggactctgccagctatgaaaaactgtctgatttcttcaacgacgttaaaccgcagggctataagctgagctttacgtccatcccactgtcagagatcgataagatgattgatgaaggtaaactgtttttgtttcagatatataacaaagacttcgcgaagaaggcgacggggaagaagaacctgcataccctttattgggaaaacctattctcagtcgagaatctgcaagatgtggtgttgaagctcaatggcgaagccgagctgttctggcgtgaggctagcatcaaaaaggacaaggtgatcgttcacaaaaaaggttctattctggtgaatcgtaccaccacggatggtaagagcatcccggaggccatttatcaagaaatctatcaattaaaaaacaaaatggcggattccatcagcgacgaagcgaaacgccttctagagtccggcaccgttgtctgtaaagtcgccactcatgatatcgttaaggataaacattttactgaaaacacgtatctgttccattgtccgattaccatgaacttcaaggcaaaagaccgtaccaataaggaatttaacaatcatgttctggaggttcttaacaagaatccggatattaaggtgatcggcttagaccgtggcgaacgtcatctgctgtacctgagcctgatcaatcagaagggtgaaattgagtgccagaaaacgctgaacctagttgagcaagttcgtaatgataagaccgtttccgttaattatcatgaaaaactggtgcacaaagaaggcagccgtgatgctgcgagaaaaaactggcagaccattggcaatattaaagagctgaaggagggctacctgtcggcggtggtgcacgagattgcgagtctgatggtaaagcacaatgcgatcgttgtaatggaagacctgaatttcggctttaagcgcggtcgttttgctgtggagcgtcagatctaccaaaagttcgaaaacatgctgattgagaagctgaactatctggtttttaaagaccgtaaagtgacggagccgggtggcgttctgaacgcgtaccagttggcgaacaagagcgcgaaggtgacagatgtttataaacaatgcggttggctgttctatatcccggcagcgtacaccagcaaaattgatccgcgtaccggtttcgcgaatctgttcattaccaagggtctgaccaatgttgagaagaagaaggagtttttcggcaagttcgactcgattcgttatgatgcgaccgagtcttgtttcgttttttccttcgactacgcaaagatttgtgacaatgctgattacaagaagaaatgggatgtttacacccgtggtactcgtctcgtttacaacaagaccgaacgcaagaacgtgagcgtcaacccaaccgaagagttgcagtgtgtttttgatgagttcggcatcaagtggaataccggcgaagacctgattgaatctattagcctgatcccggcggaaaagtccaacgcgaagttcttcgacgttttgttgcgtatgtttaacgcgactcttcagatgagaaacagcgtgccgaataccgacaccgactacttggtcagcccggtgaaagctgaagacggcagctttttcgacagccgcgaggagtttaagaaaggtggcgatgcccgcctgccgatagactgcgatgctaatggtgcgtaccatattgccctgaaaggcttgtacttgttgttgaatgatttcaaccgtgataacaagggcgtcatccaaaacatctctaacaaggactggtttaaattcgtgcaggagaaagtttacaaagactaa

SEQ ID NO: 805 - DNA, 3882 bp, synthetic construct
  source 1..3882: mol_type = other DNA
atggctaggataattgatgaattttgtggacagatgaatggatacagccgttccatcacgctgcgtaaccgcctggtgccgatcggcaagaccgaggaaaatctgaaacagtttctggagaaggacttagagcgcgcaactgcgtacccggacatcaaaaacctgattgacgctatccatcgtaatgtcattgaggacaccttaagcaaagtggccctgaactggaacgaaatctttaatatcctcgcgacgtaccagaacgaaaaagataaaaagaaaaaggcggcgatcaaaaaggacctggagaagctccaaagcggtgcacgtaaaaagattgttgaggcattcaaaaagaacccggattttgaaaaactgttcaaagagggtctgtttaaagagttgctgcctgaactgatcaaaagcgcaccggttgatgaaatcgcggttaaaaccaaggcgctggaatgcttcaaccgttttagcacctatttcacgggtttccacgacaatcgcaaaaacatgtactcggaagaagctaaatctaccgcaattagctatcgcatcgtgaacgaaaatttcccgaaattttttgccaatatcaagttgttcaactatctgaaagagcactttccgcgaatcatcattgataccgaagagtccctgaaagactatttgaagggcaaaaagctggattctgtatttagcattgacggctttaacagcgtgctggcgcagagcgggattgatttctataacaccgtgataggcggtatttcaggtgaggccggcaccaaaaaaacgcagggtcttaacgagaagattaacttagcgcgccagcaattatccaaggaggagaagaacaagctgcgcggtaaaatggtggtgctgtttaaacagatcttgtctgatcgtgaaaccagcagctttatcccagtgggttttgccaacaaggaggaggtgtactctacggtgaaagaattcaacaactcgattgccgaaaaggcggtgtccaaggtgcgtgatctattcctgcaccgcgaagaattcacgctaaacgagattttcgtcccggcaaagagcttgaccgacttcagtcaggccatcttcggatcctggtctattttgagtgagggcctgttcctgctggagaaggacagcatgaaaaaggctctaagcgaatcccaagaagaaaagatcaataaggagattgcgaaaaaagactgctcctttaccgaactacaactggcgtacgagcgctactgcaccgagcacaacttgccggttgaaaaattctgcaaagactacttcgacatcgtcgattacaggggaaacggtgcgaaaagcgaaaaaacaaaagtgagcatcctgagcgaaatcctggaaacctttttacaattggactttgaccacattcaggacctgcaacaagaaaagaacgctgcgattcctatcaaagcatatcttgacgaagttcagaatttgtaccaccacctgaagttggtcgattatcgtggcgaagagcagaaagactcaaccttttatagcaaacacgatgaaatcctgaccgatctttctcagatcgtcccattgtataataaagtccgtaactttgttaccaaaaaactgggtgagagcaaaaagatcgagctgaacttcgattgcccgactctggctaatggctgggatgagaatcaagagtccagcaacgatgcaattatcctgagaaaggacggcaaatactatctgggcatttacaacccgaacaacaaaccgaaattcgcgaagaaggacagcatcgtgggtgattgctatgaaaaaatggcatacaagcaaatcgcactgccgatgggtttgggtgcatttgtgcgcaaatgctttggcaccgctcagaaatacggttggggttgcccggagaattgcctgaacagcgagggtaaaattatcatcaaagacgaggaggcgaagggtaatctggaggcaatcatcgactgttacaaagattttctgaacaagtacgaaaaggacggcttcaagtacaaggactacaatttttccttcctggactctgccagctatgaaaaactgtctgatttcttcaacgacgttaaaccgcagggctataagctgagctttacgtccatcccactgtcagagatcgataagatgattgatgaaggtaaactgtttttgtttcagatatataacaaagacttcgcgaagaaggcgacggggaagaagaacctgcataccctttattgggaaaacctattctcagtcgagaatctgcaagatgtggtgttgaagctcaatggcgaagccgagctgttctggcgtgaggctagcatcaaaaaggacaaggtgatcgttcacaaaaaaggttctattctggtgaatcgtaccaccacggatggtaagagcatcccggaggccatttatcaagaaatctatcaattaaaaaacaaaatggcggattccatcagcgacgaagcgaaacgccttctagagtccggcaccgttgtctgtaaagtcgccactcatgatatcgttaaggataaacattttactgaaaacacgtatctgttccattgtccgattaccatgaacttcaaggcaaaagaccgtaccaataaggaatttaacaatcatgttctggaggttcttaacaagaatccggatattaaggtgatcggcttagaccgtggcgaacgtcatctgctgtacctgagcctgatcaatcagaagggtgaaattgagtgccagaaaacgctgaacctagttgagcaagttcgtaatgataagaccgtttccgttaattatcatgaaaaactggtgcacaaagaaggcagccgtgatgctgcgagaaaaaactggcagaccattggcaatattaaagagctgaaggagggctacctgtcggcggtggtgcacgagattgcgagtctgatggtaaagcacaatgcgatcgttgtaatggaagacctgaatttcggctttaagcgcggtcgttttgctgtggagcgtcagatctaccaaaagttcgaaaacatgctgattgagaagctgaactatctggtttttaaagaccgtaaagtgacggagccgggtggcgttctgaacgcgtaccagttggcgaacaagagcgcgaaggtgacagatgtttataaacaatgcggttggctgttctatatcccggcagcgtacaccagcaaaattgatccgcgtaccggtttcgcgaatctgttcattaccaagggtctgaccaatgttgagaagaagaaggagtttttcggcaagttcgactcgattcgttatgatgcgaccgagtcttgtttcgttttttccttcgactacgcaaagatttgtgacaatgctgattacaagaagaaatgggatgtttacacccgtggtactcgtctcgtttacaacaagaccgaacgcaagaacgtgagcgtcaacccaaccgaagagttgcagtgtgtttttgatgagttcggcatcaagtggaataccggcgaagacctgattgaatctattagcctgatcccggcggaaaagtccaacgcgaagttcttcgacgttttgttgcgtatgtttaacgcgactcttcagatgagaaacagcgtgccgaataccgacaccgactacttggtcagcccggtgaaagctgaagacggcagctttttcgacagccgcgaggagtttaagaaaggtggcgatgcccgcctgccgatagactgcgatgctaatggtgcgtaccatattgccctgaaaggcttgtacttgttgttgaatgatttcaaccgtgataacaagggcgtcatccaaaacatctctaacaaggactggtttaaattcgtgcaggagaaagtttacaaagactaa

SEQ ID NO: 806 - DNA, 3882 bp, synthetic construct
  source 1..3882: mol_type = other DNA
atggctaggataattgatgaattttgtggacagatgaatggatacagccgttccatcacgctgcgtaaccgcctggtgccgatcggcaagaccgaggaaaatctgaaacagtttctggagaaggacttagagcgcgcaactgcgtacccggacatcaaaaacctgattgacgctatccatcgtaatgtcattgaggacaccttaagcaaagtggccctgaactggaacgaaatctttaatatcctcgcgacgtaccagaacgaaaaagataaaaagaaaaaggcggcgatcaaaaaggacctggagaagctccaaagcggtgcacgtaaaaagattgttgaggcattcaaaaagaacccggattttgaaaaactgttcaaagagggtctgtttaaagagttgctgcctgaactgatcaaaagcgcaccggttgatgaaatcgcggttaaaaccaaggcgctggaatgcttcaaccgttttagcacctatttcacgggtttccacgacaatcgcaaaaacatgtactcggaagaagctaaatctaccgcaattagctatcgcatcgtgaacgaaaatttcccgaaattttttgccaatatcaagttgttcaactatctgaaagagcactttccgcgaatcatcattgataccgaagagtccctgaaagactatttgaagggcaaaaagctggattctgtatttagcattgacggctttaacagcgtgctggcgcagagcgggattgatttctataacaccgtgataggcggtatttcaggtgaggccggcaccaaaaaaacgcagggtcttaacgagaagattaacttagcgcgccagcaattatccaaggaggagaagaacaagctgcgcggtaaaatggtggtgctgtttaaacagatcttgtctgatcgtgaaaccagcagctttatcccagtgggttttgccaacaaggaggaggtgtactctacggtgaaagaattcaacaactcgattgccgaaaaggcggtgtccaaggtgcgtgatctattcctgcaccgcgaagaattcacgctaaacgagattttcgtcccggcaaagagcttgaccgacttcagtcaggccatcttcggatcctggtctattttgagtgagggcctgttcctgctggagaaggacagcatgaaaaaggctctaagcgaatcccaagaagaaaagatcaataaggagattgcgaaaaaagactgctcctttaccgaactacaactggcgtacgagcgctactgcaccgagcacaacttgccggttgaaaaattctgcaaagactacttcgacatcgtcgattacaggggaaacggtgcgaaaagcgaaaaaacaaaagtgagcatcctgagcgaaatcctggaaacctttttacaattggactttgaccacattcaggacctgcaacaagaaaagaacgctgcgattcctatcaaagcatatcttgacgaagttcagaatttgtaccaccacctgaagttggtcgattatcgtggcgaagagcagaaagactcaaccttttatagcaaacacgatgaaatcctgaccgatctttctcagatcgtcccattgtataataaagtccgtaactttgttaccaaaaaactgggtgagagcaaaaagatcaagctgaacttcgattgcccgactctggctaatggctgggatgagaatcaagagtccagcaacgatgcaattatcctgagaaaggacggcatatactatctgggcatttacaacccgaacaacaaaccgaaattcgcgaagaaggacagcatcgtgggtgattgctatgaaaaaatggcatacaagcaaatcgcactgccgatgggtttgggtgcatttgtgcgcaaatgctttggcaccgctcagaaatacggttggggttgcccggagaattgcctgaacagcgagggtaaaattatcatcaaagacgaggaggcgaagggtaatctggaggcaatcatcgactgttacaaagattttctgaacaagtacgaaaaggacggcttcaagtacaaggactacaatttttccttcctggactctgccagctatgaaaaactgtctgatttcttcaacgacgttaaaccgcagggctataagctgagctttacgtccatcccactgtcagagatcgataagatgattgatgaaggtaaactgtttttgtttcagatatataacaaagacttcgcgaagaaggcgacggggaagaagaacctgcataccctttattgggaaaacctattctcagtcgagaatctgcaagatgtggtgttgaagctcaatggcgaagccgagctgttctggcgtgaggctagcatcaaaaaggacaaggtgatcgttcacaaaaaaggttctattctggtgaatcgtaccaccacggatggtaagagcatcccggaggccatttatcaagaaatctatcaattaaaaaacaaaatggcggattccatcagcgacgaagcgaaacgccttctagagtccggcaccgttgtctgtaaagtcgccactcatgatatcgttaaggataaacattttactgaaaacacgtatctgttccattgtccgattaccatgaacttcaaggcaaaagaccgtaccaataaggaatttaacaatcatgttctggaggttcttaacaagaatccggatattaaggtgatcggcttagaccgtggcgaacgtcatctgctgtacctgagcctgatcaatcagaagggtgaaattgagtgccagaaaacgctgaacctagttgagcaagttcgtaatgataagaccgtttccgttaattatcatgaaaaactggtgcacaaagaaggcagccgtgatgctgcgagaaaaaactggcagaccattggcaatattaaagagctgaaggagggctacctgtcggcggtggtgcacgagattgcgagtctgatggtaaagcacaatgcgatcgttgtaatggaagacctgaatttcggctttaagcgcggtcgttttgctgtggagcgtcagatctaccaaaagttcgaaaacatgctgattgagaagctgaactatctggtttttaaagaccgtaaagtgacggagccgggtggcgttctgaacgcgtaccagttggcgaacaagagcgcgaaggtgacagatgtttataaacaatgcggttggctgttctatatcccggcagcgtacaccagcaaaattgatccgcgtaccggtttcgcgaatctgttcattaccaagggtctgaccaatgttgagaagaagaaggagtttttcggcaagttcgactcgattcgttatgatgcgaccgagtcttgtttcgttttttccttcgactacgcaaagatttgtgacaatgctgattacaagaagaaatgggatgtttacacccgtggtactcgtctcgtttacaacaagaccgaacgcaagaacgtgagcgtcaacccaaccgaagagttgcagtgtgtttttgatgagttcggcatcaagtggaataccggcgaagacctgattgaatctattagcctgatcccggcggaaaagtccaacgcgaagttcttcgacgttttgttgcgtatgtttaacgcgactcttcagatgagaaacagcgtgccgaataccgacaccgactacttggtcagcccggtgaaagctgaagacggcagctttttcgacagccgcgaggagtttaagaaaggtggcgatgcccgcctgccgatagactgcgatgctaatggtgcgtaccatattgccctgaaaggcttgtacttgttgttgaatgatttcaaccgtgataacaagggcgtcatccaaaacatctctaacaaggactggtttaaattcgtgcaggagaaagtttacaaagactaa

SEQ ID NO: 807 - DNA, 3882 bp, synthetic construct
  source 1..3882: mol_type = other DNA
atggctaggataattgatgaattttgtggacagatgaatggatacagccgttccatcacgctgcgtaaccgcctggtgccgatcggcaagaccgaggaaaatctgaaacagtttctggagaaggacttagagcgcgcaactgcgtacccggacatcaaaaacctgattgacgctatccatcgtaatgtcattgaggacaccttaagcaaagtggccctgaactggaacgaaatctttaatatcctcgcgacgtaccagaacgaaaaagataaaaagaaaaaggcggcgatcaaaaaggacctggagaagctccaaagcggtgcacgtaaaaagattgttgaggcattcaaaaagaacccggattttgaaaaactgttcaaagagggtctgtttaaagagttgctgcctgaactgatcaaaagcgcaccggttgatgaaatcgcggttaaaaccaaggcgctggaatgcttcaaccgttttagcacctatttcacgggtttccacgacaatcgcaaaaacatgtactcggaagaagctaaatctaccgcaattagctatcgcatcgtgaacgaaaatttcccgaaattttttgccaatatcaagttgttcaactatctgaaagagcactttccgcgaatcatcattgataccgaagagtccctgaaagactatttgaagggcaaaaagctggattctgtatttagcattgacggctttaacagcgtgctggcgcagagcgggattgatttctataacaccgtgataggcggtatttcaggtgaggccggcaccaaaaaaacgcagggtcttaacgagaagattaacttagcgcgccagcaattatccaaggaggagaagaacaagctgcgcggtaaaatggtggtgctgtttaaacagatcttgtctgatcgtgaaaccagcagctttatcccagtgggttttgccaacaaggaggaggtgtactctacggtgaaagaattcaacaactcgattgccgaaaaggcggtgtccaaggtgcgtgatctattcctgcaccgcgaagaattcacgctaaacgagattttcgtcccggcaaagagcttgaccgacttcagtcaggccatcttcggatcctggtctattttgagtgagggcctgttcctgctggagaaggacagcatgaaaaaggctctaagcgaatcccaagaagaaaagatcaataaggagattgcgaaaaaagactgctcctttaccgaactacaactggcgtacgagcgctactgcaccgagcacaacttgccggttgaaaaattctgcaaagactacttcgacatcgtcgattacaggggaaacggtgcgaaaagcgaaaaaacaaaagtgagcatcctgagcgaaatcctggaaacctttttacaattggactttgaccacattcaggacctgcaacaagaaaagaacgctgcgattcctatcaaagcatatcttgacgaagttcagaatttgtaccaccacctgaagttggtcgattatcgtggcgaagagcaggaagactcaaccttttatagcaaacacgatgaaatcctgaccgatctttctcagatcgtcccattgtataataaagtccgtaactttgttaccaaaaaactgggtgagagcaaaaagatcaagctgaacttcgattgcccgactctggctaatggctgggatgagaatcaagagtccagcaacgatgcaattatcctgagaaaggacggcaaatactatctgggcatttacaacccgaacaacaaaccgaaattcgcgaagaaggacagcatcgtgggtgattgctatgaaaaaatggcatacaagcaaatcgcactgccgatgggtttgggtgcatttgtgcgcaaatgctttggcaccgctcagaaatacggttggggttgcccggagaattgcctgaacagcgagggtaaaattatcatcaaagacgaggaggcgaagggtaatctggaggcaatcatcgactgttacaaagattttctgaacaagtacgaaaaggacggcttcaagtacaaggactacaatttttccttcctggactctgccagctatgaaaaactgtctgatttcttcaacgacgttaaaccgcagggctataagctgagctttacgtccatcccactgtcagagatcgataagatgattgatgaaggtaaactgtttttgtttcagatatataacaaagacttcgcgaagaaggcgacggggaagaagaacctgcataccctttattgggaaaacctattctcagtcgagaatctgcaagatgtggtgttgaagctcaatggcgaagccgagctgttctggcgtgaggctagcatcaaaaaggacaaggtgatcgttcacaaaaaaggttctattctggtgaatcgtaccaccacggatggtaagagcatcccggaggccatttatcaagaaatctatcaattaaaaaacaaaatggcggattccatcagcgacgaagcgaaacgccttctagagtccggcaccgttgtctgtaaagtcgccactcatgatatcgttaaggataaacattttactgaaaacacgtatctgttccattgtccgattaccatgaacttcaaggcaaaagaccgtaccaataaggaatttaacaatcatgttctggaggttcttaacaagaatccggatattaaggtgatcggcttagaccgtggcgaacgtcatctgctgtacctgagcctgatcaatcagaagggtgaaattgagtgccagaaaacgctgaacctagttgagcaagttcgtaatgataagaccgtttccgttaattatcatgaaaaactggtgcacaaagaaggcagccgtgatgctgcgagaaaaaactggcagaccattggcaatattaaagagctgaaggagggctacctgtcggcggtggtgcacgagattgcgagtctgatggtaaagcacaatgcgatcgttgtaatggaagacctgaatttcggctttaagcgcggtcgttttgctgtggagcgtcagatctaccaaaagttcgaaaacatgctgattgagaagctgaactatctggtttttaaagaccgtaaagtgacggagccgggtggcgttctgaacgcgtaccagttggcgaacaagagcgcgaaggtgacagatgtttataaacaatgcggttggctgttctatatcccggcagcgtacaccagcaaaattgatccgcgtaccggtttcgcgaatctgttcattaccaagggtctgaccaatgttgagaagaagaaggagtttttcggcaagttcgactcgattcgttatgatgcgaccgagtcttgtttcgttttttccttcgactacgcaaagatttgtgacaatgctgattacaagaagaaatgggatgtttacacccgtggtactcgtctcgtttacaacaagaccgaacgcaagaacgtgagcgtcaacccaaccgaagagttgcagtgtgtttttgatgagttcggcatcaagtggaataccggcgaagacctgattgaatctattagcctgatcccggcggaaaagtccaacgcgaagttcttcgacgttttgttgcgtatgtttaacgcgactcttcagatgagaaacagcgtgccgaataccgacaccgactacttggtcagcccggtgaaagctgaagacggcagctttttcgacagccgcgaggagtttaagaaaggtggcgatgcccgcctgccgatagactgcgatgctaatggtgcgtaccatattgccctgaaaggcttgtacttgttgttgaatgatttcaaccgtgataacaagggcgtcatccaaaacatctctaacaaggactggtttaaattcgtgcaggagaaagtttacaaagactaa

SEQ ID NO: 808 - DNA, 3882 bp, synthetic construct
  source 1..3882: mol_type = other DNA
atggctaggataattgatgaattttgtggacagatgaatggatacagccgttccatcacgctgcgtaaccgcctggtgccgatcggcaagaccgaggaaaatctgaaacagtttctggagaaggacttagagcgcgcaactgcgtacccggacatcaaaaacctgattgacgctatccatcgtaatgtcattgaggacaccttaagcaaagtggccctgaactggaacgaaatctttaatatcctcgcgacgtaccagaacgaaaaagataaaaagaaaaaggcggcgatcaaaaaggacctggagaagctccaaagcggtgcacgtaaaaagattgttgaggcattcaaaaagaacccggattttgaaaaactgttcaaagagggtctgtttaaagagttgctgcctgaactgatcaaaagcgcaccggttgatgaaatcgcggttaaaaccaaggcgctggaatgcttcaaccgttttagcacctatttcacgggtttccacgacaatcgcaaaaacatgtactcggaagaagctaaatctaccgcaattagctatcgcatcgtgaacgaaaatttcccgaaattttttgccaatatcaagttgttcaactatctgaaagagcactttccgcgaatcatcattgataccgaagagtccctgaaagactatttgaagggcaaaaagctggattctgtatttagcattgacggctttaacagcgtgctggcgcagagcgggattgatttctataacaccgtgataggcggtatttcaggtgaggccggcaccaaaaaaacgcagggtcttaacgagaagattaacttagcgcgccagcaattatccaaggaggagaagaacaagctgcgcggtaaaatggtggtgctgtttaaacagatcttgtctgatcgtgaaaccagcagctttatcccagtgggttttgccaacaaggaggaggtgtactctacggtgaaagaattcaacaactcgattgccgaaaaggcggtgtccaaggtgcgtgatctattcctgcaccgcgaagaattcacgctaaacgagattttcgtcccggcaaagagcttgaccgacttcagtcaggccatcttcggatcctggtctattttgagtgagggcctgttcctgctggagaaggacagcatgaaaaaggctctaagcgaatcccaagaagaaaagatcaataaggagattgcgaaaaaagactgctcctttaccgaactacaactggcgtacgagcgctactgcaccgagcacaacttgccggttgaaaaattctgcaaagactacttcgacatcgtcgattacaggggaaacggtgcgaaaagcgaaaaaacaaaagtgagcatcctgagcgaaatcctggaaacctttttacaattggactttgaccacattcaggacctgcaacaagaaaagaacgctgcgattcctatcaaagcatatcttgacgaagttcagaatttgtaccaccacctgaagttggtcgattatcgtggcgaagagcagaaagactcaaccttttatagcaaacacgatgaaatcctgaccgatctttctcagatcgtcccattgtataataaagtccgtaactttgttaccaaaaaactgggtgagagcaaaaagatcaagctgaacttcgattgcccgactctggctaatggctgggatgagaatcaagagtccagcaacgatgcaattatcctgagaaaggacggcaaatactatctgggcatttacaacccgaacaacaaaccgaaattcgcgacgaaggacagcatcgtgggtgattgctatgaaaaaatggcatacaagcaaatcgcactgccgatgggtttgggtgcatttgtgcgcaaatgctttggcaccgctcagaaatacggttggggttgcccggagaattgcctgaacagcgagggtaaaattatcatcaaagacgaggaggcgaagggtaatctggaggcaatcatcgactgttacaaagattttctgaacaagtacgaaaaggacggcttcaagtacaaggactacaatttttccttcctggactctgccagctatgaaaaactgtctgatttcttcaacgacgttaaaccgcagggctataagctgagctttacgtccatcccactgtcagagatcgataagatgattgatgaaggtaaactgtttttgtttcagatatataacaaagacttcgcgaagaaggcgacggggaagaagaacctgcataccctttattgggaaaacctattctcagtcgagaatctgcaagatgtggtgttgaagctcaatggcgaagccgagctgttctggcgtgaggctagcatcaaaaaggacaaggtgatcgttcacaaaaaaggttctattctggtgaatcgtaccaccacggatggtaagagcatcccggaggccatttatcaagaaatctatcaattaaaaaacaaaatggcggattccatcagcgacgaagcgaaacgccttctagagtccggcaccgttgtctgtaaagtcgccactcatgatatcgttaaggataaacattttactgaaaacacgtatctgttccattgtccgattaccatgaacttcaaggcaaaagaccgtaccaataaggaatttaacaatcatgttctggaggttcttaacaagaatccggatattaaggtgatcggcttagaccgtggcgaacgtcatctgctgtacctgagcctgatcaatcagaagggtgaaattgagtgccagaaaacgctgaacctagttgagcaagttcgtaatgataagaccgtttccgttaattatcatgaaaaactggtgcacaaagaaggcagccgtgatgctgcgagaaaaaactggcagaccattggcaatattaaagagctgaaggagggctacctgtcggcggtggtgcacgagattgcgagtctgatggtaaagcacaatgcgatcgttgtaatggaagacctgaatttcggctttaagcgcggtcgttttgctgtggagcgtcagatctaccaaaagttcgaaaacatgctgattgagaagctgaactatctggtttttaaagaccgtaaagtgacggagccgggtggcgttctgaacgcgtaccagttggcgaacaagagcgcgaaggtgacagatgtttataaacaatgcggttggctgttctatatcccggcagcgtacaccagcaaaattgatccgcgtaccggtttcgcgaatctgttcattaccaagggtctgaccaatgttgagaagaagaaggagtttttcggcaagttcgactcgattcgttatgatgcgaccgagtcttgtttcgttttttccttcgactacgcaaagatttgtgacaatgctgattacaagaagaaatgggatgtttacacccgtggtactcgtctcgtttacaacaagaccgaacgcaagaacgtgagcgtcaacccaaccgaagagttgcagtgtgtttttgatgagttcggcatcaagtggaataccggcgaagacctgattgaatctattagcctgatcccggcggaaaagtccaacgcgaagttcttcgacgttttgttgcgtatgtttaacgcgactcttcagatgagaaacagcgtgccgaataccgacaccgactacttggtcagcccggtgaaagctgaagacggcagctttttcgacagccgcgaggagtttaagaaaggtggcgatgcccgcctgccgatagactgcgatgctaatggtgcgtaccatattgccctgaaaggcttgtacttgttgttgaatgatttcaaccgtgataacaagggcgtcatccaaaacatctctaacaaggactggtttaaattcgtgcaggagaaagtttacaaagactaa

SEQ ID NO: 809 - DNA, 3882 bp, synthetic construct
  source 1..3882: mol_type = other DNA
atggctaggataattgatgaattttgtggacagatgaatggatacagccgttccatcacgctgcgtaaccgcctggtgccgatcggcaagaccgaggaaaatctgaaacagtttctggagaaggacttagagcgcgcaactgcgtacccggacatcaaaaacctgattgacgctatccatcgtaatgtcattgaggacaccttaagcaaagtggccctgaactggaacgaaatctttaatatcctcgcgacgtaccagaacgaaaaagataaaaagaaaaaggcggcgatcaaaaaggacctggagaagctccaaagcggtgcacgtaaaaagattgttgaggcattcaaaaagaacccggattttgaaaaactgttcaaagagggtctgtttaaagagttgctgcctgaactgatcaaaagcgcaccggttgatgaaatcgcggttaaaaccaaggcgctggaatgcttcaaccgttttagcacctatttcacgggtttccacgacaatcgcaaaaacatgtactcggaagaagctaaatctaccgcaattagctatcgcatcgtgaacgaaaatttcccgaaattttttgccaatatcaagttgttcaactatctgaaagagcactttccgcgaatcatcattgataccgaagagtccctgaaagactatttgaagggcaaaaagctggattctgtatttagcattgacggctttaacagcgtgctggcgcagagcgggattgatttctataacaccgtgataggcggtatttcaggtgaggccggcaccaaaaaaacgcagggtcttaacgagaagattaacttagcgcgccagcaattatccaaggaggagaagaacaagctgcgcggtaaaatggtggtgctgtttaaacagatcttgtctgatcgtgaaaccagcagctttatcccagtgggttttgccaacaaggaggaggtgtactctacggtgaaagaattcaacaactcgattgccgaaaaggcggtgtccaaggtgcgtgatctattcctgcaccgcgaagaattcacgctaaacgagattttcgtcccggcaaagagcttgaccgacttcagtcaggccatcttcggatcctggtctattttgagtgagggcctgttcctgctggagaaggacagcatgaaaaaggctctaagcgaatcccaagaagaaaagatcaataaggagattgcgaaaaaagactgctcctttaccgaactacaactggcgtacgagcgctactgcaccgagcacaacttgccggttgaaaaattctgcaaagactacttcgacatcgtcgattacaggggaaacggtgcgaaaagcgaaaaaacaaaagtgagcatcctgagcgaaatcctggaaacctttttacaattggactttgaccacattcaggacctgcaacaagaaaagaacgctgcgattcctatcaaagcatatcttgacgaagttcagaatttgtaccaccacctgaagttggacgattatcgtggcgaagagcagaaagactcaaccttttatagcaaacacgatgaaatcctgaccgatctttctcagatcgtcccattgtataataaagtccgtaactttgttaccaaaaaactgggtgagagcaaaaagatcaagctgaacttcgattgcccgactctggctaatggctgggatgagaatcaagagtccagcaacgatgcaattatcctgagaaaggacggcaaatactatctgggcatttacaacccgaacaacaaaccgaaattcgcgaagaaggacagcatcgtgggtgattgctatgaaaaaatggcatacaagcaaatcgcactgccgatgggtttgggtgcatttgtgcgcaaatgctttggcaccgctcagaaatacggttggggttgcccggagaattgcctgaacagcgagggtaaaattatcatcaaagacgaggaggcgaagggtaatctggaggcaatcatcgactgttacaaagattttctgaacaagtacgaaaaggacggcttcaagtacaaggactacaatttttccttcctggactctgccagctatgaaaaactgtctgatttcttcaacgacgttaaaccgcagggctataagctgagctttacgtccatcccactgtcagagatcgataagatgattgatgaaggtaaactgtttttgtttcagatatataacaaagacttcgcgaagaaggcgacggggaagaagaacctgcataccctttattgggaaaacctattctcagtcgagaatctgcaagatgtggtgttgaagctcaatggcgaagccgagctgttctggcgtgaggctagcatcaaaaaggacaaggtgatcgttcacaaaaaaggttctattctggtgaatcgtaccaccacggatggtaagagcatcccggaggccatttatcaagaaatctatcaattaaaaaacaaaatggcggattccatcagcgacgaagcgaaacgccttctagagtccggcaccgttgtctgtaaagtcgccactcatgatatcgttaaggataaacattttactgaaaacacgtatctgttccattgtccgattaccatgaacttcaaggcaaaagaccgtaccaataaggaatttaacaatcatgttctggaggttcttaacaagaatccggatattaaggtgatcggcttagaccgtggcgaacgtcatctgctgtacctgagcctgatcaatcagaagggtgaaattgagtgccagaaaacgctgaacctagttgagcaagttcgtaatgataagaccgtttccgttaattatcatgaaaaactggtgcacaaagaaggcagccgtgatgctgcgagaaaaaactggcagaccattggcaatattaaagagctgaaggagggctacctgtcggcggtggtgcacgagattgcgagtctgatggtaaagcacaatgcgatcgttgtaatggaagacctgaatttcggctttaagcgcggtcgttttgctgtggagcgtcagatctaccaaaagttcgaaaacatgctgattgagaagctgaactatctggtttttaaagaccgtaaagtgacggagccgggtggcgttctgaacgcgtaccagttggcgaacaagagcgcgaaggtgacagatgtttataaacaatgcggttggctgttctatatcccggcagcgtacaccagcaaaattgatccgcgtaccggtttcgcgaatctgttcattaccaagggtctgaccaatgttgagaagaagaaggagtttttcggcaagttcgactcgattcgttatgatgcgaccgagtcttgtttcgttttttccttcgactacgcaaagatttgtgacaatgctgattacaagaagaaatgggatgtttacacccgtggtactcgtctcgtttacaacaagaccgaacgcaagaacgtgagcgtcaacccaaccgaagagttgcagtgtgtttttgatgagttcggcatcaagtggaataccggcgaagacctgattgaatctattagcctgatcccggcggaaaagtccaacgcgaagttcttcgacgttttgttgcgtatgtttaacgcgactcttcagatgagaaacagcgtgccgaataccgacaccgactacttggtcagcccggtgaaagctgaagacggcagctttttcgacagccgcgaggagtttaagaaaggtggcgatgcccgcctgccgatagactgcgatgctaatggtgcgtaccatattgccctgaaaggcttgtacttgttgttgaatgatttcaaccgtgataacaagggcgtcatccaaaacatctctaacaaggactggtttaaattcgtgcaggagaaagtttacaaagactaa

SEQ ID NO: 810 - DNA, 3882 bp, synthetic construct
  source 1..3882: mol_type = other DNA
atggctaggataattgatgaattttgtggacagatgaatggatacagccgttccatcacgctgcgtaaccgcctggtgccgatcggcaagaccgaggaaaatctgaaacagtttctggagaaggacttagagcgcgcaactgcgtacccggacatcaaaaacctgattgacgctatccatcgtaatgtcattgaggacaccttaagcaaagtggccctgaactggaacgaaatctttaatatcctcgcgacgtaccagaacgaaaaagataaaaagaaaaaggcggcgatcaaaaaggacctggagaagctccaaagcggtgcacgtaaaaagattgttgaggcattcaaaaagaacccggattttgaaaaactgttcaaagagggtctgtttaaagagttgctgcctgaactgatcaaaagcgcaccggttgatgaaatcgcggttaaaaccaaggcgctggaatgcttcaaccgttttagcacctatttcacgggtttccacgacaatcgcaaaaacatgtactcggaagaagctaaatctaccgcaattagctatcgcatcgtgaacgaaaatttcccgaaattttttgccaatatcaagttgttcaactatctgaaagagcactttccgcgaatcatcattgataccgaagagtccctgaaagactatttgaagggcaaaaagctggattctgtatttagcattgacggctttaacagcgtgctggcgcagagcgggattgatttctataacaccgtgataggcggtatttcaggtgaggccggcaccaaaaaaacgcagggtcttaacgagaagattaacttagcgcgccagcaattatccaaggaggagaagaacaagctgcgcggtaaaatggtggtgctgtttaaacagatcttgtctgatcgtgaaaccagcagctttatcccagtgggttttgccaacaaggaggaggtgtactctacggtgaaagaattcaacaactcgattgccgaaaaggcggtgtccaaggtgcgtgatctattcctgcaccgcgaagaattcacgctaaacgagattttcgtcccggcaaagagcttgaccgacttcagtcaggccatcttcggatcctggtctattttgagtgagggcctgttcctgctggagaaggacagcatgaaaaaggctctaagcgaatcccaagaagaaaagatcaataaggagattgcgaaaaaagactgctcctttaccgaactacaactggcgtacgagcgctactgcaccgagcacaacttgccggttgaaaaattctgcaaagactacttcgacatcgtcgattacaggggaaacggtgcgaaaagcgaaaaaacaaaagtgagcatcctgagcgaaatcctggaaacctttttacaattggactttgaccacattcaggacctgcaacaagaaaagaacgctgcgattcctatcaaagcatatcttgacgaagttcagaatttgtaccaccacctgaagttggtcgattatcgtggcgaagagcagaaagactcaaccttttatagcaaacacgatgaaatcctgaccgatctttctcagatcgtcccattgtataataaagtccgtaactttgttaccaaaaaactgggtgagagcaaaaagatcaagctgaacttcgattgcccgactctggctaatggctgggatgagaatcaagagtccatcaacgatgcaattatcctgagaaaggacggcaaatactatctgggcatttacaacccgaacaacaaaccgaaattcgcgaagaaggacagcatcgtgggtgattgctatgaaaaaatggcatacaagcaaatcgcactgccgatgggtttgggtgcatttgtgcgcaaatgctttggcaccgctcagaaatacggttggggttgcccggagaattgcctgaacagcgagggtaaaattatcatcaaagacgaggaggcgaagggtaatctggaggcaatcatcgactgttacaaagattttctgaacaagtacgaaaaggacggcttcaagtacaaggactacaatttttccttcctggactctgccagctatgaaaaactgtctgatttcttcaacgacgttaaaccgcagggctataagctgagctttacgtccatcccactgtcagagatcgataagatgattgatgaaggtaaactgtttttgtttcagatatataacaaagacttcgcgaagaaggcgacggggaagaagaacctgcataccctttattgggaaaacctattctcagtcgagaatctgcaagatgtggtgttgaagctcaatggcgaagccgagctgttctggcgtgaggctagcatcaaaaaggacaaggtgatcgttcacaaaaaaggttctattctggtgaatcgtaccaccacggatggtaagagcatcccggaggccatttatcaagaaatctatcaattaaaaaacaaaatggcggattccatcagcgacgaagcgaaacgccttctagagtccggcaccgttgtctgtaaagtcgccactcatgatatcgttaaggataaacattttactgaaaacacgtatctgttccattgtccgattaccatgaacttcaaggcaaaagaccgtaccaataaggaatttaacaatcatgttctggaggttcttaacaagaatccggatattaaggtgatcggcttagaccgtggcgaacgtcatctgctgtacctgagcctgatcaatcagaagggtgaaattgagtgccagaaaacgctgaacctagttgagcaagttcgtaatgataagaccgtttccgttaattatcatgaaaaactggtgcacaaagaaggcagccgtgatgctgcgagaaaaaactggcagaccattggcaatattaaagagctgaaggagggctacctgtcggcggtggtgcacgagattgcgagtctgatggtaaagcacaatgcgatcgttgtaatggaagacctgaatttcggctttaagcgcggtcgttttgctgtggagcgtcagatctaccaaaagttcgaaaacatgctgattgagaagctgaactatctggtttttaaagaccgtaaagtgacggagccgggtggcgttctgaacgcgtaccagttggcgaacaagagcgcgaaggtgacagatgtttataaacaatgcggttggctgttctatatcccggcagcgtacaccagcaaaattgatccgcgtaccggtttcgcgaatctgttcattaccaagggtctgaccaatgttgagaagaagaaggagtttttcggcaagttcgactcgattcgttatgatgcgaccgagtcttgtttcgttttttccttcgactacgcaaagatttgtgacaatgctgattacaagaagaaatgggatgtttacacccgtggtactcgtctcgtttacaacaagaccgaacgcaagaacgtgagcgtcaacccaaccgaagagttgcagtgtgtttttgatgagttcggcatcaagtggaataccggcgaagacctgattgaatctattagcctgatcccggcggaaaagtccaacgcgaagttcttcgacgttttgttgcgtatgtttaacgcgactcttcagatgagaaacagcgtgccgaataccgacaccgactacttggtcagcccggtgaaagctgaagacggcagctttttcgacagccgcgaggagtttaagaaaggtggcgatgcccgcctgccgatagactgcgatgctaatggtgcgtaccatattgccctgaaaggcttgtacttgttgttgaatgatttcaaccgtgataacaagggcgtcatccaaaacatctctaacaaggactggtttaaattcgtgcaggagaaagtttacaaagactaa

SEQ ID NO: 811 - DNA, 3882 bp, synthetic construct
  source 1..3882: mol_type = other DNA
atggctaggataattgatgaattttgtggacagatgaatggatacagccgttccatcacgctgcgtaaccgcctggtgccgatcggcaagaccgaggaaaatctgaaacagtttctggagaaggacttagagcgcgcaactgcgtacccggacatcaaaaacctgattgacgctatccatcgtaatgtcattgaggacaccttaagcaaagtggccctgaactggaacgaaatctttaatatcctcgcgacgtaccagaacgaaaaagataaaaagaaaaaggcggcgatcaaaaaggacctggagaagctccaaagcggtgcacgtaaaaagattgttgaggcattcaaaaagaacccggattttgaaaaactgttcaaagagggtctgtttaaagagttgctgcctgaactgatcaaaagcgcaccggttgatgaaatcgcggttaaaaccaaggcgctggaatgcttcaaccgttttagcacctatttcacgggtttccacgacaatcgcaaaaacatgtactcggaagaagctaaatctaccgcaattagctatcgcatcgtgaacgaaaatttcccgaaattttttgccaatatcaagttgttcaactatctgaaagagcactttccgcgaatcatcattgataccgaagagtccctgaaagactatttgaagggcaaaaagctggattctgtatttagcattgacggctttaacagcgtgctggcgcagagcgggattgatttctataacaccgtgataggcggtatttcaggtgaggccggcaccaaaaaaacgcagggtcttaacgagaagattaacttagcgcgccagcaattatccaaggaggagaagaacaagctgcgcggtaaaatggtggtgctgtttaaacagatcttgtctgatcgtgaaaccagcagctttatcccagtgggttttgccaacaaggaggaggtgtactctacggtgaaagaattcaacaactcgattgccgaaaaggcggtgtccaaggtgcgtgatctattcctgcaccgcgaagaattcacgctaaacgagattttcgtcccggcaaagagcttgaccgacttcagtcaggccatcttcggatcctggtctattttgagtgagggcctgttcctgctggagaaggacagcatgaaaaaggctctaagcgaatcccaagaagaaaagatcaataaggagattgcgaaaaaagactgctcctttaccgaactacaactggcgtacgagcgctactgcaccgagcacaacttgccggttgaaaaattctgcaaagactacttcgacatcgtcgattacaggggaaacggtgcgaaaagcgaaaaaacaaaagtgagcatcctgagcgaaatcctggaaacctttttacaattggactttgacctcattcaggacctgcaacaagaaaagaacgctgcgattcctatcaaagcatatcttgacgaagttcagaatttgtaccaccacctgaagttggtcgattatcgtggcgaagagcagaaagactcaaccttttatagcaaacacgatgaaatcctgaccgatctttctcagatcgtcccattgtataataaagtccgtaactttgttaccaaaaaactgggtgagagcaaaaagatcaagctgaacttcgattgcccgactctggctaatggctgggatgagaatcaagagtccagcaacgatgcaattatcctgagaaaggacggcaaatactatctgggcatttacaacccgaacaacaaaccgaaattcgcgaagaaggacagcatcgtgggtgattgctatgaaaaaatggcatacaagcaaatcgcactgccgatgggtttgggtgcatttgtgcgcaaatgctttggcaccgctcagaaatacggttggggttgcccggagaattgcctgaacagcgagggtaaaattatcatcaaagacgaggaggcgaagggtaatctggaggcaatcatcgactgttacaaagattttctgaacaagtacgaaaaggacggcttcaagtacaaggactacaatttttccttcctggactctgccagctatgaaaaactgtctgatttcttcaacgacgttaaaccgcagggctataagctgagctttacgtccatcccactgtcagagatcgataagatgattgatgaaggtaaactgtttttgtttcagatatataacaaagacttcgcgaagaaggcgacggggaagaagaacctgcataccctttattgggaaaacctattctcagtcgagaatctgcaagatgtggtgttgaagctcaatggcgaagccgagctgttctggcgtgaggctagcatcaaaaaggacaaggtgatcgttcacaaaaaaggttctattctggtgaatcgtaccaccacggatggtaagagcatcccggaggccatttatcaagaaatctatcaattaaaaaacaaaatggcggattccatcagcgacgaagcgaaacgccttctagagtccggcaccgttgtctgtaaagtcgccactcatgatatcgttaaggataaacattttactgaaaacacgtatctgttccattgtccgattaccatgaacttcaaggcaaaagaccgtaccaataaggaatttaacaatcatgttctggaggttcttaacaagaatccggatattaaggtgatcggcttagaccgtggcgaacgtcatctgctgtacctgagcctgatcaatcagaagggtgaaattgagtgccagaaaacgctgaacctagttgagcaagttcgtaatgataagaccgtttccgttaattatcatgaaaaactggtgcacaaagaaggcagccgtgatgctgcgagaaaaaactggcagaccattggcaatattaaagagctgaaggagggctacctgtcggcggtggtgcacgagattgcgagtctgatggtaaagcacaatgcgatcgttgtaatggaagacctgaatttcggctttaagcgcggtcgttttgctgtggagcgtcagatctaccaaaagttcgaaaacatgctgattgagaagctgaactatctggtttttaaagaccgtaaagtgacggagccgggtggcgttctgaacgcgtaccagttggcgaacaagagcgcgaaggtgacagatgtttataaacaatgcggttggctgttctatatcccggcagcgtacaccagcaaaattgatccgcgtaccggtttcgcgaatctgttcattaccaagggtctgaccaatgttgagaagaagaaggagtttttcggcaagttcgactcgattcgttatgatgcgaccgagtcttgtttcgttttttccttcgactacgcaaagatttgtgacaatgctgattacaagaagaaatgggatgtttacacccgtggtactcgtctcgtttacaacaagaccgaacgcaagaacgtgagcgtcaacccaaccgaagagttgcagtgtgtttttgatgagttcggcatcaagtggaataccggcgaagacctgattgaatctattagcctgatcccggcggaaaagtccaacgcgaagttcttcgacgttttgttgcgtatgtttaacgcgactcttcagatgagaaacagcgtgccgaataccgacaccgactacttggtcagcccggtgaaagctgaagacggcagctttttcgacagccgcgaggagtttaagaaaggtggcgatgcccgcctgccgatagactgcgatgctaatggtgcgtaccatattgccctgaaaggcttgtacttgttgttgaatgatttcaaccgtgataacaagggcgtcatccaaaacatctctaacaaggactggtttaaattcgtgcaggagaaagtttacaaagactaa

SEQ ID NO: 812 - DNA, 3882 bp, synthetic construct
  source 1..3882: mol_type = other DNA
atggctaggataattgatgaattttgtggacagatgaatggatacagccgttccatcacgctgcgtaaccgcctggtgccgatcggcaagaccgaggaaaatctgaaacagtttctggagaaggacttagagcgcgcaactgcgtacccggacatcaaaaacctgattgacgctatccatcgtaatgtcattgaggacaccttaagcaaagtggccctgaactggaacgaaatctttaatatcctcgcgacgtaccagaacgaaaaagataaaaagaaaaaggcggcgatcaaaaaggacctggagaagctccaaagcggtgcacgtaaaaagattgttgaggcattcaaaaagaacccggattttgaaaaactgttcaaagagggtctgtttaaagagttgctgcctgaactgatcaaaagcgcaccggttgatgaaatcgcggttaaaaccaaggcgctggaatgcttcaaccgttttagcacctatttcacgggtttccacgacaatcgcaaaaacatgtactcggaagaagctaaatctaccgcaattagctatcgcatcgtgaacgaaaatttcccgaaattttttgccaatatcaagttgttcaactatctgaaagagcactttccgcgaatcatcattgataccgaagagtccctgaaagactatttgaagggcaaaaagctggattctgtatttagcattgacggctttaacagcgtgctggcgcagagcgggattgatttctataacaccgtgataggcggtatttcaggtgaggccggcaccaaaaaaacgcagggtcttaacgagaagattaacttagcgcgccagcaattatccaaggaggagaagaacaagctgcgcggtaaaatggtggtgctgtttaaacagatcttgtctgatcgtgaaaccagcagctttatcccagtgggttttgccaacaaggaggaggtgtactctacggtgaaagaattcaacaactcgattgccgaaaaggcggtgtccaaggtgcgtgatctattcctgcaccgcgaagaattcacgctaaacgagattttcgtcccggcaaagagcttgaccgacttcagtcaggccatcttcggatcctggtctattttgagtgagggcctgttcctgctggagaaggacagcatgaaaaaggctctaagcgaatcccaagaagaaaagatcaataaggagattgcgaaaaaagactgctcctttaccgaactacaactggcgtacgagcgctactgcaccgagcacaacttgccggttgaaaaattctgcaaagactacttcgacatcgtcgattacaggagaaacggtgcgaaaagcgaaaaaacaaaagtgagcatcctgagcgaaatcctggaaacctttttacaattggactttgaccacattcaggacctgcaacaagaaaagaacgctgcgattcctatcaaagcatatcttgacgaagttcagaatttgtaccaccacctgaagttggtcgattatcgtggcgaagagcagaaagactcaaccttttatagcaaacacgatgaaatcctgaccgatctttctcagatcgtcccattgtataataaagtccgtaactttgttaccaaaaaactgggtgagagcaaaaagatcaagctgaacttcgattgcccgactctggctaatggctgggatgagaatcaagagtccagcaacgatgcaattatcctgagaaaggacggcaaatactatctgggcatttacaacccgaacaacaaaccgaaattcgcgaagaaggacagcatcgtgggtgattgctatgaaaaaatggcatacaagcaaatcgcactgccgatgggtttgggtgcatttgtgcgcaaatgctttggcaccgctcagaaatacggttggggttgcccggagaattgcctgaacagcgagggtaaaattatcatcaaagacgaggaggcgaagggtaatctggaggcaatcatcgactgttacaaagattttctgaacaagtacgaaaaggacggcttcaagtacaaggactacaatttttccttcctggactctgccagctatgaaaaactgtctgatttcttcaacgacgttaaaccgcagggctataagctgagctttacgtccatcccactgtcagagatcgataagatgattgatgaaggtaaactgtttttgtttcagatatataacaaagacttcgcgaagaaggcgacggggaagaagaacctgcataccctttattgggaaaacctattctcagtcgagaatctgcaagatgtggtgttgaagctcaatggcgaagccgagctgttctggcgtgaggctagcatcaaaaaggacaaggtgatcgttcacaaaaaaggttctattctggtgaatcgtaccaccacggatggtaagagcatcccggaggccatttatcaagaaatctatcaattaaaaaacaaaatggcggattccatcagcgacgaagcgaaacgccttctagagtccggcaccgttgtctgtaaagtcgccactcatgatatcgttaaggataaacattttactgaaaacacgtatctgttccattgtccgattaccatgaacttcaaggcaaaagaccgtaccaataaggaatttaacaatcatgttctggaggttcttaacaagaatccggatattaaggtgatcggcttagaccgtggcgaacgtcatctgctgtacctgagcctgatcaatcagaagggtgaaattgagtgccagaaaacgctgaacctagttgagcaagttcgtaatgataagaccgtttccgttaattatcatgaaaaactggtgcacaaagaaggcagccgtgatgctgcgagaaaaaactggcagaccattggcaatattaaagagctgaaggagggctacctgtcggcggtggtgcacgagattgcgagtctgatggtaaagcacaatgcgatcgttgtaatggaagacctgaatttcggctttaagcgcggtcgttttgctgtggagcgtcagatctaccaaaagttcgaaaacatgctgattgagaagctgaactatctggtttttaaagaccgtaaagtgacggagccgggtggcgttctgaacgcgtaccagttggcgaacaagagcgcgaaggtgacagatgtttataaacaatgcggttggctgttctatatcccggcagcgtacaccagcaaaattgatccgcgtaccggtttcgcgaatctgttcattaccaagggtctgaccaatgttgagaagaagaaggagtttttcggcaagttcgactcgattcgttatgatgcgaccgagtcttgtttcgttttttccttcgactacgcaaagatttgtgacaatgctgattacaagaagaaatgggatgtttacacccgtggtactcgtctcgtttacaacaagaccgaacgcaagaacgtgagcgtcaacccaaccgaagagttgcagtgtgtttttgatgagttcggcatcaagtggaataccggcgaagacctgattgaatctattagcctgatcccggcggaaaagtccaacgcgaagttcttcgacgttttgttgcgtatgtttaacgcgactcttcagatgagaaacagcgtgccgaataccgacaccgactacttggtcagcccggtgaaagctgaagacggcagctttttcgacagccgcgaggagtttaagaaaggtggcgatgcccgcctgccgatagactgcgatgctaatggtgcgtaccatattgccctgaaaggcttgtacttgttgttgaatgatttcaaccgtgataacaagggcgtcatccaaaacatctctaacaaggactggtttaaattcgtgcaggagaaagtttacaaagactaa

SEQ ID NO: 813 - DNA, 3882 bp, synthetic construct
  source 1..3882: mol_type = other DNA
atggctaggataattgatgaattttgtggacagatgaatggatacagccgttccatcacgctgcgtaaccgcctggtgccgatcggcaagaccgaggaaaatctgaaacagtttctggagaaggacttagagcgcgcaactgcgtacccggacatcaaaaacctgattgacgctatccatcgtaatgtcattgaggacaccttaagcaaagtggccctgaactggaacgaaatctttaatatcctcgcgacgtaccagaacgaaaaagataaaaagaaaaaggcggcgatcaaaaaggacctggagaagctccaaagcggtgcacgtaaaaagattgttgaggcattcaaaaagaacccggattttgaaaaactgttcaaagagggtctgtttaaagagttgctgcctgaactgatcaaaagcgcaccggttgatgaaatcgcggttaaaaccaaggcgctggaatgcttcaaccgttttagcacctatttcacgggtttccacgacaatcgcaaaaacatgtactcggaagaagctaaatctaccgcaattagctatcgcatcgtgaacgaaaatttcccgaaattttttgccaatatcaagttgttcaactatctgaaagagcactttccgcgaatcatcattgataccgaagagtccctgaaagactatttgaagggcaaaaagctggattctgtatttagcattgacggctttaacagcgtgctggcgcagagcgggattgatttctataacaccgtgataggcggtatttcaggtgaggccggcaccaaaaaaacgcagggtcttaacgagaagattaacttagcgcgccagcaattatccaaggaggagaagaacaagctgcgcggtaaaatggtggtgctgtttaaacagatcttgtctgatcgtgaaaccagcagctttatcccagtgggttttgccaacaaggaggaggtgtactctacggtgaaagaattcaacaactcgattgccgaaaaggcggtgtccaaggtgcgtgatctattcctgcaccgcgaagaattcacgctaaacgagattttcgtcccggcaaagagcttgaccgacttcagtcaggccatcttcggatcctggtctattttgagtgagggcctgttcctgctggagaaggacagcatgaaaaaggctctaagcgaatcccaagaagaaaagatcaataaggagattgcgaaaaaagactgctcctttaccgaactacaactggcgtacgagcgctactgcaccgagcacaacttgccggttgaaaaattctgcaaagactacttcgacatcgtcgattacaggggaaacggtgcgaaaagcgaaaaaacaaaagtgagcatcctgagcgaaatcctggaaacctttttacaattggactttgaccacattcaggacctgcaacaagaaaagaacgctgcgattcctatcaaagcatatcttgacgaagttcagaatttgtaccaccacctgaagttggtcgattatcgtggcgaagagcagaaagactcaaccttttatagcaaacacgatgaaatcctgaccgatctttctcagatcgtcccattgtataataaagtccgtaactttgttaccaaaaaactgggtgagagcaaaaagatcaagctgaacttcgattgcccgactctggctaatggctgggatgagaatcaagagtccagcaacgatgcaattatcctgagaaaggacggcaaatactatctgggcatttacaacccgaacaacaaatcgaaattcgcgaagaaggacagcatcgtgggtgattgctatgaaaaaatggcatacaagcaaatcgcactgccgatgggtttgggtgcatttgtgcgcaaatgctttggcaccgctcagaaatacggttggggttgcccggagaattgcctgaacagcgagggtaaaattatcatcaaagacgaggaggcgaagggtaatctggaggcaatcatcgactgttacaaagattttctgaacaagtacgaaaaggacggcttcaagtacaaggactacaatttttccttcctggactctgccagctatgaaaaactgtctgatttcttcaacgacgttaaaccgcagggctataagctgagctttacgtccatcccactgtcagagatcgataagatgattgatgaaggtaaactgtttttgtttcagatatataacaaagacttcgcgaagaaggcgacggggaagaagaacctgcataccctttattgggaaaacctattctcagtcgagaatctgcaagatgtggtgttgaagctcaatggcgaagccgagctgttctggcgtgaggctagcatcaaaaaggacaaggtgatcgttcacaaaaaaggttctattctggtgaatcgtaccaccacggatggtaagagcatcccggaggccatttatcaagaaatctatcaattaaaaaacaaaatggcggattccatcagcgacgaagcgaaacgccttctagagtccggcaccgttgtctgtaaagtcgccactcatgatatcgttaaggataaacattttactgaaaacacgtatctgttccattgtccgattaccatgaacttcaaggcaaaagaccgtaccaataaggaatttaacaatcatgttctggaggttcttaacaagaatccggatattaaggtgatcggcttagaccgtggcgaacgtcatctgctgtacctgagcctgatcaatcagaagggtgaaattgagtgccagaaaacgctgaacctagttgagcaagttcgtaatgataagaccgtttccgttaattatcatgaaaaactggtgcacaaagaaggcagccgtgatgctgcgagaaaaaactggcagaccattggcaatattaaagagctgaaggagggctacctgtcggcggtggtgcacgagattgcgagtctgatggtaaagcacaatgcgatcgttgtaatggaagacctgaatttcggctttaagcgcggtcgttttgctgtggagcgtcagatctaccaaaagttcgaaaacatgctgattgagaagctgaactatctggtttttaaagaccgtaaagtgacggagccgggtggcgttctgaacgcgtaccagttggcgaacaagagcgcgaaggtgacagatgtttataaacaatgcggttggctgttctatatcccggcagcgtacaccagcaaaattgatccgcgtaccggtttcgcgaatctgttcattaccaagggtctgaccaatgttgagaagaagaaggagtttttcggcaagttcgactcgattcgttatgatgcgaccgagtcttgtttcgttttttccttcgactacgcaaagatttgtgacaatgctgattacaagaagaaatgggatgtttacacccgtggtactcgtctcgtttacaacaagaccgaacgcaagaacgtgagcgtcaacccaaccgaagagttgcagtgtgtttttgatgagttcggcatcaagtggaataccggcgaagacctgattgaatctattagcctgatcccggcggaaaagtccaacgcgaagttcttcgacgttttgttgcgtatgtttaacgcgactcttcagatgagaaacagcgtgccgaataccgacaccgactacttggtcagcccggtgaaagctgaagacggcagctttttcgacagccgcgaggagtttaagaaaggtggcgatgcccgcctgccgatagactgcgatgctaatggtgcgtaccatattgccctgaaaggcttgtacttgttgttgaatgatttcaaccgtgataacaagggcgtcatccaaaacatctctaacaaggactggtttaaattcgtgcaggagaaagtttacaaagactaa

SEQ ID NO: 814 - DNA, 3882 bp, synthetic construct
  source 1..3882: mol_type = other DNA
atggctaggataattgatgaattttgtggacagatgaatggatacagccgttccatcacgctgcgtaaccgcctggtgccgatcggcaagaccgaggaaaatctgaaacagtttctggagaaggacttagagcgcgcaactgcgtacccggacatcaaaaacctgattgacgctatccatcgtaatgtcattgaggacaccttaagcaaagtggccctgaactggaacgaaatctttaatatcctcgcgacgtaccagaacgaaaaagataaaaagaaaaaggcggcgatcaaaaaggacctggagaagctccaaagcggtgcacgtaaaaagattgttgaggcattcaaaaagaacccggattttgaaaaactgttcaaagagggtctgtttaaagagttgctgcctgaactgatcaaaagcgcaccggttgatgaaatcgcggttaaaaccaaggcgctggaatgcttcaaccgttttagcacctatttcacgggtttccacgacaatcgcaaaaacatgtactcggaagaagctaaatctaccgcaattagctatcgcatcgtgaacgaaaatttcccgaaattttttgccaatatcaagttgttcaactatctgaaagagcactttccgcgaatcatcattgataccgaagagtccctgaaagactatttgaagggcaaaaagctggattctgtatttagcattgacggctttaacagcgtgctggcgcagagcgggattgatttctataacaccgtgataggcggtatttcaggtgaggccggcaccaaaaaaacgcagggtcttaacgagaagattaacttagcgcgccagcaattatccaaggaggagaagaacaagctgcgcggtaaaatggtggtgctgtttaaacagatcttgtctgatcgtgaaaccagcagctttatcccagtgggttttgccaacaaggaggaggtgtactctacggtgaaagaattcaacaactcgattgccgaaaaggcggtgtccaaggtgcgtgatctattcctgcaccgcgaagaattcacgctaaacgagattttcgtcccggcaaagagcttgaccgacttcagtcaggccatcttcggatcctggtctattttgagtgagggcctgttcctgctggagaaggacagcatgaaaaaggctctaagcgaatcccaagaagaaaagatcaataaggagattgcgaaaaaagactgctcctttaccgaactacaactggcgtacgagcgctactgcaccgagcacaacttgccggttgaaaaattctgcaaagactacttcgacatcgtcgattacaggggaaacggtgcgaaaagcgaaaaaacaaaagtgagcatcctgagcgaaatcctggaaacctttttacaattggactttgaccacattcaggacctgcaacaagaaaagaacgctgcgattcctatcaaagcatatcttgacgaagttcagaatttgtaccaccacctgaagttggtcgattatcgtggcgaagagcagaaagactcaaccttttatagcacacacgatgaaatcctgaccgatctttctcagatcgtcccattgtataataaagtccgtaactttgttaccaaaaaactgggtgagagcaaaaagatcaagctgaacttcgattgcccgactctggctaatggctgggatgagaatcaagagtccagcaacgatgcaattatcctgagaaaggacggcaaatactatctgggcatttacaacccgaacaacaaaccgaaattcgcgaagaaggacagcatcgtgggtgattgctatgaaaaaatggcatacaagcaaatcgcactgccgatgggtttgggtgcatttgtgcgcaaatgctttggcaccgctcagaaatacggttggggttgcccggagaattgcctgaacagcgagggtaaaattatcatcaaagacgaggaggcgaagggtaatctggaggcaatcatcgactgttacaaagattttctgaacaagtacgaaaaggacggcttcaagtacaaggactacaatttttccttcctggactctgccagctatgaaaaactgtctgatttcttcaacgacgttaaaccgcagggctataagctgagctttacgtccatcccactgtcagagatcgataagatgattgatgaaggtaaactgtttttgtttcagatatataacaaagacttcgcgaagaaggcgacggggaagaagaacctgcataccctttattgggaaaacctattctcagtcgagaatctgcaagatgtggtgttgaagctcaatggcgaagccgagctgttctggcgtgaggctagcatcaaaaaggacaaggtgatcgttcacaaaaaaggttctattctggtgaatcgtaccaccacggatggtaagagcatcccggaggccatttatcaagaaatctatcaattaaaaaacaaaatggcggattccatcagcgacgaagcgaaacgccttctagagtccggcaccgttgtctgtaaagtcgccactcatgatatcgttaaggataaacattttactgaaaacacgtatctgttccattgtccgattaccatgaacttcaaggcaaaagaccgtaccaataaggaatttaacaatcatgttctggaggttcttaacaagaatccggatattaaggtgatcggcttagaccgtggcgaacgtcatctgctgtacctgagcctgatcaatcagaagggtgaaattgagtgccagaaaacgctgaacctagttgagcaagttcgtaatgataagaccgtttccgttaattatcatgaaaaactggtgcacaaagaaggcagccgtgatgctgcgagaaaaaactggcagaccattggcaatattaaagagctgaaggagggctacctgtcggcggtggtgcacgagattgcgagtctgatggtaaagcacaatgcgatcgttgtaatggaagacctgaatttcggctttaagcgcggtcgttttgctgtggagcgtcagatctaccaaaagttcgaaaacatgctgattgagaagctgaactatctggtttttaaagaccgtaaagtgacggagccgggtggcgttctgaacgcgtaccagttggcgaacaagagcgcgaaggtgacagatgtttataaacaatgcggttggctgttctatatcccggcagcgtacaccagcaaaattgatccgcgtaccggtttcgcgaatctgttcattaccaagggtctgaccaatgttgagaagaagaaggagtttttcggcaagttcgactcgattcgttatgatgcgaccgagtcttgtttcgttttttccttcgactacgcaaagatttgtgacaatgctgattacaagaagaaatgggatgtttacacccgtggtactcgtctcgtttacaacaagaccgaacgcaagaacgtgagcgtcaacccaaccgaagagttgcagtgtgtttttgatgagttcggcatcaagtggaataccggcgaagacctgattgaatctattagcctgatcccggcggaaaagtccaacgcgaagttcttcgacgttttgttgcgtatgtttaacgcgactcttcagatgagaaacagcgtgccgaataccgacaccgactacttggtcagcccggtgaaagctgaagacggcagctttttcgacagccgcgaggagtttaagaaaggtggcgatgcccgcctgccgatagactgcgatgctaatggtgcgtaccatattgccctgaaaggcttgtacttgttgttgaatgatttcaaccgtgataacaagggcgtcatccaaaacatctctaacaaggactggtttaaattcgtgcaggagaaagtttacaaagactaa

SEQ ID NO: 815 - DNA, 3882 bp, synthetic construct
  source 1..3882: mol_type = other DNA
atggctaggataattgatgaattttgtggacagatgaatggatacagccgttccatcacgctgcgtaaccgcctggtgccgatcggcaagaccgaggaaaatctgaaacagtttctggagaaggacttagagcgcgcaactgcgtacccggacatcaaaaacctgattgacgctatccatcgtaatgtcattgaggacaccttaagcaaagtggccctgaactggaacgaaatctttaatatcctcgcgacgtaccagaacgaaaaagataaaaagaaaaaggcggcgatcaaaaaggacctggagaagctccaaagcggtgcacgtaaaaagattgttgaggcattcaaaaagaacccggattttgaaaaactgttcaaagagggtctgtttaaagagttgctgcctgaactgatcaaaagcgcaccggttgatgaaatcgcggttaaaaccaaggcgctggaatgcttcaaccgttttagcacctatttcacgggtttccacgacaatcgcaaaaacatgtactcggaagaagctaaatctaccgcaattagctatcgcatcgtgaacgaaaatttcccgaaattttttgccaatatcaagttgttcaactatctgaaagagcactttccgcgaatcatcattgataccgaagagtccctgaaagactatttgaagggcaaaaagctggattctgtatttagcattgacggctttaacagcgtgctggcgcagagcgggattgatttctataacaccgtgataggcggtatttcaggtgaggccggcaccaaaaaaacgcagggtcttaacgagaagattaacttagcgcgccagcaattatccaaggaggagaagaacaagctgcgcggtaaaatggtggtgctgtttaaacagatcttgtctgatcgtgaaaccagcagctttatcccagtgggttttgccaacaaggaggaggtgtactctacggtgaaagaattcaacaactcgattgccgaaaaggcggtgtccaaggtgcgtgatctattcctgcaccgcgaagaattcacgctaaacgagattttcgtcccggcaaagagcttgaccgacttcagtcaggccatcttcggatcctggtctattttgagtgagggcctgttcctgctggtgaaggacagcatgaaaaaggctctaagcgaatcccaagaagaaaagatcaataaggagattgcgaaaaaagactgctcctttaccgaactacaactggcgtacgagcgctactgcaccgagcacaacttgccggttgaaaaattctgcaaagactacttcgacatcgtcgattacaggggaaacggtgcgaaaagcgaaaaaacaaaagtgagcatcctgagcgaaatcctggaaacctttttacaattggactttgaccacattcaggacctgcaacaagaaaagaacgctgcgattcctatcaaagcatatcttgacgaagttcagaatttgtaccaccacctgaagttggtcgattatcgtggcgaagagcagaaagactcaaccttttatagcaaacacgatgaaatcctgaccgatctttctcagatcgtcccattgtataataaagtccgtaactttgttaccaaaaaactgggtgagagcaaaaagatcaagctgaacttcgattgcccgactctggctaatggctgggatgagaatcaagagtccagcaacgatgcaattatcctgagaaaggacggcaaatactatctgggcatttacaacccgaacaacaaaccgaaattcgcgaagaaggacagcatcgtgggtgattgctatgaaaaaatggcatacaagcaaatcgcactgccgatgggtttgggtgcatttgtgcgcaaatgctttggcaccgctcagaaatacggttggggttgcccggagaattgcctgaacagcgagggtaaaattatcatcaaagacgaggaggcgaagggtaatctggaggcaatcatcgactgttacaaagattttctgaacaagtacgaaaaggacggcttcaagtacaaggactacaatttttccttcctggactctgccagctatgaaaaactgtctgatttcttcaacgacgttaaaccgcagggctataagctgagctttacgtccatcccactgtcagagatcgataagatgattgatgaaggtaaactgtttttgtttcagatatataacaaagacttcgcgaagaaggcgacggggaagaagaacctgcataccctttattgggaaaacctattctcagtcgagaatctgcaagatgtggtgttgaagctcaatggcgaagccgagctgttctggcgtgaggctagcatcaaaaaggacaaggtgatcgttcacaaaaaaggttctattctggtgaatcgtaccaccacggatggtaagagcatcccggaggccatttatcaagaaatctatcaattaaaaaacaaaatggcggattccatcagcgacgaagcgaaacgccttctagagtccggcaccgttgtctgtaaagtcgccactcatgatatcgttaaggataaacattttactgaaaacacgtatctgttccattgtccgattaccatgaacttcaaggcaaaagaccgtaccaataaggaatttaacaatcatgttctggaggttcttaacaagaatccggatattaaggtgatcggcttagaccgtggcgaacgtcatctgctgtacctgagcctgatcaatcagaagggtgaaattgagtgccagaaaacgctgaacctagttgagcaagttcgtaatgataagaccgtttccgttaattatcatgaaaaactggtgcacaaagaaggcagccgtgatgctgcgagaaaaaactggcagaccattggcaatattaaagagctgaaggagggctacctgtcggcggtggtgcacgagattgcgagtctgatggtaaagcacaatgcgatcgttgtaatggaagacctgaatttcggctttaagcgcggtcgttttgctgtggagcgtcagatctaccaaaagttcgaaaacatgctgattgagaagctgaactatctggtttttaaagaccgtaaagtgacggagccgggtggcgttctgaacgcgtaccagttggcgaacaagagcgcgaaggtgacagatgtttataaacaatgcggttggctgttctatatcccggcagcgtacaccagcaaaattgatccgcgtaccggtttcgcgaatctgttcattaccaagggtctgaccaatgttgagaagaagaaggagtttttcggcaagttcgactcgattcgttatgatgcgaccgagtcttgtttcgttttttccttcgactacgcaaagatttgtgacaatgctgattacaagaagaaatgggatgtttacacccgtggtactcgtctcgtttacaacaagaccgaacgcaagaacgtgagcgtcaacccaaccgaagagttgcagtgtgtttttgatgagttcggcatcaagtggaataccggcgaagacctgattgaatctattagcctgatcccggcggaaaagtccaacgcgaagttcttcgacgttttgttgcgtatgtttaacgcgactcttcagatgagaaacagcgtgccgaataccgacaccgactacttggtcagcccggtgaaagctgaagacggcagctttttcgacagccgcgaggagtttaagaaaggtggcgatgcccgcctgccgatagactgcgatgctaatggtgcgtaccatattgccctgaaaggcttgtacttgttgttgaatgatttcaaccgtgataacaagggcgtcatccaaaacatctctaacaaggactggtttaaattcgtgcaggagaaagtttacaaagactaa

SEQ ID NO: 816 - DNA, 3882 bp, synthetic construct
  source 1..3882: mol_type = other DNA
atggctaggataattgatgaattttgtggacagatgaatggatacagccgttccatcacgctgcgtaaccgcctggtgccgatcggcaagaccgaggaaaatctgaaacagtttctggagaaggacttagagcgcgcaactgcgtacccggacatcaaaaacctgattgacgctatccatcgtaatgtcattgaggacaccttaagcaaagtggccctgaactggaacgaaatctttaatatcctcgcgacgtaccagaacgaaaaagataaaaagaaaaaggcggcgatcaaaaaggacctggagaagctccaaagcggtgcacgtaaaaagattgttgaggcattcaaaaagaacccggattttgaaaaactgttcaaagagggtctgtttaaagagttgctgcctgaactgatcaaaagcgcaccggttgatgaaatcgcggttaaaaccaaggcgctggaatgcttcaaccgttttagcacctatttcacgggtttccacgacaatcgcaaaaacatgtactcggaagaagctaaatctaccgcaattagctatcgcatcgtgaacgaaaatttcccgaaattttttgccaatatcaagttgttcaactatctgaaagagcactttccgcgaatcatcattgataccgaagagtccctgaaagactatttgaagggcaaaaagctggattctgtatttagcattgacggctttaacagcgtgctggcgcagagcgggattgatttctataacaccgtgataggcggtatttcaggtgaggccggcaccaaaaaaacgcagggtcttaacgagaagattaacttagcgcgccagcaattatccaaggaggagaagaacaagctgcgcggtaaaatggtggtgctgtttaaacagatcttgtctgatcgtgaaaccagcagctttatcccagtgggttttgccaacaaggaggaggtgtactctacggtgaaagaattcaacaactcgattgccgaaaaggcggtgtccaaggtgcgtgatctattcctgcaccgcgaagaattcacgctaaacgagattttcgtcccggcaaagagcttgaccgacttcagtcaggccatcttcggatcctggtctattttgagtgagggcctgttcctgctggagaaggacagcatgaaaaaggctctaagcgaatcccaagaagaaaagatcaataaggagattgcgaaaaaagactgctcctttaccgaactacaactggcgtacgagcgctactgcaccgagcacaacttgccggttgaaaaattctgcaaagactacttcgacatcgtcgattacaggggaaacggtgcgaaaagcgaaaaaacaaaagtgagcatcctgagcgaaatcctggaaacctttttacaattggactttgaccacattcaggaccagcaacaagaaaagaacgctgcgattcctatcaaagcatatcttgacgaagttcagaatttgtaccaccacctgaagttggtcgattatcgtggcgaagagcagaaagactcaaccttttatagcaaacacgatgaaatcctgaccgatctttctcagatcgtcccattgtataataaagtccgtaactttgttaccaaaaaactgggtgagagcaaaaagatcaagctgaacttcgattgcccgactctggctaatggctgggatgagaatcaagagtccagcaacgatgcaattatcctgagaaaggacggcaaatactatctgggcatttacaacccgaacaacaaaccgaaattcgcgaagaaggacagcatcgtgggtgattgctatgaaaaaatggcatacaagcaaatcgcactgccgatgggtttgggtgcatttgtgcgcaaatgctttggcaccgctcagaaatacggttggggttgcccggagaattgcctgaacagcgagggtaaaattatcatcaaagacgaggaggcgaagggtaatctggaggcaatcatcgactgttacaaagattttctgaacaagtacgaaaaggacggcttcaagtacaaggactacaatttttccttcctggactctgccagctatgaaaaactgtctgatttcttcaacgacgttaaaccgcagggctataagctgagctttacgtccatcccactgtcagagatcgataagatgattgatgaaggtaaactgtttttgtttcagatatataacaaagacttcgcgaagaaggcgacggggaagaagaacctgcataccctttattgggaaaacctattctcagtcgagaatctgcaagatgtggtgttgaagctcaatggcgaagccgagctgttctggcgtgaggctagcatcaaaaaggacaaggtgatcgttcacaaaaaaggttctattctggtgaatcgtaccaccacggatggtaagagcatcccggaggccatttatcaagaaatctatcaattaaaaaacaaaatggcggattccatcagcgacgaagcgaaacgccttctagagtccggcaccgttgtctgtaaagtcgccactcatgatatcgttaaggataaacattttactgaaaacacgtatctgttccattgtccgattaccatgaacttcaaggcaaaagaccgtaccaataaggaatttaacaatcatgttctggaggttcttaacaagaatccggatattaaggtgatcggcttagaccgtggcgaacgtcatctgctgtacctgagcctgatcaatcagaagggtgaaattgagtgccagaaaacgctgaacctagttgagcaagttcgtaatgataagaccgtttccgttaattatcatgaaaaactggtgcacaaagaaggcagccgtgatgctgcgagaaaaaactggcagaccattggcaatattaaagagctgaaggagggctacctgtcggcggtggtgcacgagattgcgagtctgatggtaaagcacaatgcgatcgttgtaatggaagacctgaatttcggctttaagcgcggtcgttttgctgtggagcgtcagatctaccaaaagttcgaaaacatgctgattgagaagctgaactatctggtttttaaagaccgtaaagtgacggagccgggtggcgttctgaacgcgtaccagttggcgaacaagagcgcgaaggtgacagatgtttataaacaatgcggttggctgttctatatcccggcagcgtacaccagcaaaattgatccgcgtaccggtttcgcgaatctgttcattaccaagggtctgaccaatgttgagaagaagaaggagtttttcggcaagttcgactcgattcgttatgatgcgaccgagtcttgtttcgttttttccttcgactacgcaaagatttgtgacaatgctgattacaagaagaaatgggatgtttacacccgtggtactcgtctcgtttacaacaagaccgaacgcaagaacgtgagcgtcaacccaaccgaagagttgcagtgtgtttttgatgagttcggcatcaagtggaataccggcgaagacctgattgaatctattagcctgatcccggcggaaaagtccaacgcgaagttcttcgacgttttgttgcgtatgtttaacgcgactcttcagatgagaaacagcgtgccgaataccgacaccgactacttggtcagcccggtgaaagctgaagacggcagctttttcgacagccgcgaggagtttaagaaaggtggcgatgcccgcctgccgatagactgcgatgctaatggtgcgtaccatattgccctgaaaggcttgtacttgttgttgaatgatttcaaccgtgataacaagggcgtcatccaaaacatctctaacaaggactggtttaaattcgtgcaggagaaagtttacaaagactaa

SEQ ID NO: 817 - DNA, 3882 bp, synthetic construct
  source 1..3882: mol_type = other DNA
atggctaggataattgatgaattttgtggacagatgaatggatacagccgttccatcacgctgcgtaaccgcctggtgccgatcggcaagaccgaggaaaatctgaaacagtttctggagaaggacttagagcgcgcaactgcgtacccggacatcaaaaacctgattgacgctatccatcgtaatgtcattgaggacaccttaagcaaagtggccctgaactggaacgaaatctttaatatcctcgcgacgtaccagaacgaaaaagataaaaagaaaaaggcggcgatcaaaaaggacctggagaagctccaaagcggtgcacgtaaaaagattgttgaggcattcaaaaagaacccggattttgaaaaactgttcaaagagggtctgtttaaagagttgctgcctgaactgatcaaaagcgcaccggttgatgaaatcgcggttaaaaccaaggcgctggaatgcttcaaccgttttagcacctatttcacgggtttccacgacaatcgcaaaaacatgtactcggaagaagctaaatctaccgcaattagctatcgcatcgtgaacgaaaatttcccgaaattttttgccaatatcaagttgttcaactatctgaaagagcactttccgcgaatcatcattgataccgaagagtccctgaaagactatttgaagggcaaaaagctggattctgtatttagcattgacggctttaacagcgtgctggcgcagagcgggattgatttctataacaccgtgataggcggtatttcaggtgaggccggcaccaaaaaaacgcagggtcttaacgagaagattaacttagcgcgccagcaattatccaaggaggagaagaacaagctgcgcggtaaaatggtggtgctgtttaaacagatcttgtctgatcgtgaaaccagcagctttatcccagtgggttttgccaacaaggaggaggtgtactctacggtgaaagaattcaacaactcgattgccgaaaaggcggtgtccaaggtgcgtgatctattcctgcaccgcgaagaattcacgctaaacgagattttcgtcccggcaaagagcttgaccgacttcagtcaggccatcttcggatcctggtctattttgagtgagggcctgttcctgctggagaaggacagcatgaaaaaggctctaagcgaatcccaagaagaaaagatcaataaggagattgcgaaaaaagactgctcctttaccgaactacaactggcgtacgagcgctactgcaccgagcacaacttgccggttgaaaaattctgcaaagactacttcgacatcgtcgattacaggggaaacggtgcgaaaagcgaaaaaacaaaagtgagcatcctgagcgaaatcctggaaacctttttacaattggactttgacaacattcaggacctgcaacaagaaaagaacgctgcgattcctatcaaagcatatcttgacgaagttcagaatttgtaccaccacctgaagttggtcgattatcgtggcgaagagcagaaagactcaaccttttatagcaaacacgatgaaatcctgaccgatctttctcagatcgtcccattgtataataaagtccgtaactttgttaccaaaaaactgggtgagagcaaaaagatcaagctgaacttcgattgcccgactctggctaatggctgggatgagaatcaagagtccagcaacgatgcaattatcctgagaaaggacggcaaatactatctgggcatttacaacccgaacaacaaaccgaaattcgcgaagaaggacagcatcgtgggtgattgctatgaaaaaatggcatacaagcaaatcgcactgccgatgggtttgggtgcatttgtgcgcaaatgctttggcaccgctcagaaatacggttggggttgcccggagaattgcctgaacagcgagggtaaaattatcatcaaagacgaggaggcgaagggtaatctggaggcaatcatcgactgttacaaagattttctgaacaagtacgaaaaggacggcttcaagtacaaggactacaatttttccttcctggactctgccagctatgaaaaactgtctgatttcttcaacgacgttaaaccgcagggctataagctgagctttacgtccatcccactgtcagagatcgataagatgattgatgaaggtaaactgtttttgtttcagatatataacaaagacttcgcgaagaaggcgacggggaagaagaacctgcataccctttattgggaaaacctattctcagtcgagaatctgcaagatgtggtgttgaagctcaatggcgaagccgagctgttctggcgtgaggctagcatcaaaaaggacaaggtgatcgttcacaaaaaaggttctattctggtgaatcgtaccaccacggatggtaagagcatcccggaggccatttatcaagaaatctatcaattaaaaaacaaaatggcggattccatcagcgacgaagcgaaacgccttctagagtccggcaccgttgtctgtaaagtcgccactcatgatatcgttaaggataaacattttactgaaaacacgtatctgttccattgtccgattaccatgaacttcaaggcaaaagaccgtaccaataaggaatttaacaatcatgttctggaggttcttaacaagaatccggatattaaggtgatcggcttagaccgtggcgaacgtcatctgctgtacctgagcctgatcaatcagaagggtgaaattgagtgccagaaaacgctgaacctagttgagcaagttcgtaatgataagaccgtttccgttaattatcatgaaaaactggtgcacaaagaaggcagccgtgatgctgcgagaaaaaactggcagaccattggcaatattaaagagctgaaggagggctacctgtcggcggtggtgcacgagattgcgagtctgatggtaaagcacaatgcgatcgttgtaatggaagacctgaatttcggctttaagcgcggtcgttttgctgtggagcgtcagatctaccaaaagttcgaaaacatgctgattgagaagctgaactatctggtttttaaagaccgtaaagtgacggagccgggtggcgttctgaacgcgtaccagttggcgaacaagagcgcgaaggtgacagatgtttataaacaatgcggttggctgttctatatcccggcagcgtacaccagcaaaattgatccgcgtaccggtttcgcgaatctgttcattaccaagggtctgaccaatgttgagaagaagaaggagtttttcggcaagttcgactcgattcgttatgatgcgaccgagtcttgtttcgttttttccttcgactacgcaaagatttgtgacaatgctgattacaagaagaaatgggatgtttacacccgtggtactcgtctcgtttacaacaagaccgaacgcaagaacgtgagcgtcaacccaaccgaagagttgcagtgtgtttttgatgagttcggcatcaagtggaataccggcgaagacctgattgaatctattagcctgatcccggcggaaaagtccaacgcgaagttcttcgacgttttgttgcgtatgtttaacgcgactcttcagatgagaaacagcgtgccgaataccgacaccgactacttggtcagcccggtgaaagctgaagacggcagctttttcgacagccgcgaggagtttaagaaaggtggcgatgcccgcctgccgatagactgcgatgctaatggtgcgtaccatattgccctgaaaggcttgtacttgttgttgaatgatttcaaccgtgataacaagggcgtcatccaaaacatctctaacaaggactggtttaaattcgtgcaggagaaagtttacaaagactaa

SEQ ID NO: 818 - DNA, 3882 bp, synthetic construct
  source 1..3882: mol_type = other DNA
atggctaggataattgatgaattttgtggacagatgaatggatacagccgttccatcacgctgcgtaaccgcctggtgccgatcggcaagaccgaggaaaatctgaaacagtttctggagaaggacttagagcgcgcaactgcgtacccggacatcaaaaacctgattgacgctatccatcgtaatgtcattgaggacaccttaagcaaagtggccctgaactggaacgaaatctttaatatcctcgcgacgtaccagaacgaaaaagataaaaagaaaaaggcggcgatcaaaaaggacctggagaagctccaaagcggtgcacgtaaaaagattgttgaggcattcaaaaagaacccggattttgaaaaactgttcaaagagggtctgtttaaagagttgctgcctgaactgatcaaaagcgcaccggttgatgaaatcgcggttaaaaccaaggcgctggaatgcttcaaccgttttagcacctatttcacgggtttccacgacaatcgcaaaaacatgtactcggaagaagctaaatctaccgcaattagctatcgcatcgtgaacgaaaatttcccgaaattttttgccaatatcaagttgttcaactatctgaaagagcactttccgcgaatcatcattgataccgaagagtccctgaaagactatttgaagggcaaaaagctggattctgtatttagcattgacggctttaacagcgtgctggcgcagagcgggattgatttctataacaccgtgataggcggtatttcaggtgaggccggcaccaaaaaaacgcagggtcttaacgagaagattaacttagcgcgccagcaattatccaaggaggagaagaacaagctgcgcggtaaaatggtggtgctgtttaaacagatcttgtctgatcgtgaaaccagcagctttatcccagtgggttttgccaacaaggaggaggtgtactctacggtgaaagaattcaacaactcgattgccgaaaaggcggtgtccaaggtgcgtgatctattcctgcaccgcgaagaattcacgctaaacgagattttcgtcccggcaaagagcttgaccgacttcagtcaggccatcttcggatcctggtctattttgagtgagggcctgttcctgctggagaaggacagcatgaaaaaggctctaagcgaatcccaagaagaaaagatcaataaggtgattgcgaaaaaagactgctcctttaccgaactacaactggcgtacgagcgctactgcaccgagcacaacttgccggttgaaaaattctgcaaagactacttcgacatcgtcgattacaggggaaacggtgcgaaaagcgaaaaaacaaaagtgagcatcctgagcgaaatcctggaaacctttttacaattggactttgaccacattcaggacctgcaacaagaaaagaacgctgcgattcctatcaaagcatatcttgacgaagttcagaatttgtaccaccacctgaagttggtcgattatcgtggcgaagagcagaaagactcaaccttttatagcaaacacgatgaaatcctgaccgatctttctcagatcgtcccattgtataataaagtccgtaactttgttaccaaaaaactgggtgagagcaaaaagatcaagctgaacttcgattgcccgactctggctaatggctgggatgagaatcaagagtccagcaacgatgcaattatcctgagaaaggacggcaaatactatctgggcatttacaacccgaacaacaaaccgaaattcgcgaagaaggacagcatcgtgggtgattgctatgaaaaaatggcatacaagcaaatcgcactgccgatgggtttgggtgcatttgtgcgcaaatgctttggcaccgctcagaaatacggttggggttgcccggagaattgcctgaacagcgagggtaaaattatcatcaaagacgaggaggcgaagggtaatctggaggcaatcatcgactgttacaaagattttctgaacaagtacgaaaaggacggcttcaagtacaaggactacaatttttccttcctggactctgccagctatgaaaaactgtctgatttcttcaacgacgttaaaccgcagggctataagctgagctttacgtccatcccactgtcagagatcgataagatgattgatgaaggtaaactgtttttgtttcagatatataacaaagacttcgcgaagaaggcgacggggaagaagaacctgcataccctttattgggaaaacctattctcagtcgagaatctgcaagatgtggtgttgaagctcaatggcgaagccgagctgttctggcgtgaggctagcatcaaaaaggacaaggtgatcgttcacaaaaaaggttctattctggtgaatcgtaccaccacggatggtaagagcatcccggaggccatttatcaagaaatctatcaattaaaaaacaaaatggcggattccatcagcgacgaagcgaaacgccttctagagtccggcaccgttgtctgtaaagtcgccactcatgatatcgttaaggataaacattttactgaaaacacgtatctgttccattgtccgattaccatgaacttcaaggcaaaagaccgtaccaataaggaatttaacaatcatgttctggaggttcttaacaagaatccggatattaaggtgatcggcttagaccgtggcgaacgtcatctgctgtacctgagcctgatcaatcagaagggtgaaattgagtgccagaaaacgctgaacctagttgagcaagttcgtaatgataagaccgtttccgttaattatcatgaaaaactggtgcacaaagaaggcagccgtgatgctgcgagaaaaaactggcagaccattggcaatattaaagagctgaaggagggctacctgtcggcggtggtgcacgagattgcgagtctgatggtaaagcacaatgcgatcgttgtaatggaagacctgaatttcggctttaagcgcggtcgttttgctgtggagcgtcagatctaccaaaagttcgaaaacatgctgattgagaagctgaactatctggtttttaaagaccgtaaagtgacggagccgggtggcgttctgaacgcgtaccagttggcgaacaagagcgcgaaggtgacagatgtttataaacaatgcggttggctgttctatatcccggcagcgtacaccagcaaaattgatccgcgtaccggtttcgcgaatctgttcattaccaagggtctgaccaatgttgagaagaagaaggagtttttcggcaagttcgactcgattcgttatgatgcgaccgagtcttgtttcgttttttccttcgactacgcaaagatttgtgacaatgctgattacaagaagaaatgggatgtttacacccgtggtactcgtctcgtttacaacaagaccgaacgcaagaacgtgagcgtcaacccaaccgaagagttgcagtgtgtttttgatgagttcggcatcaagtggaataccggcgaagacctgattgaatctattagcctgatcccggcggaaaagtccaacgcgaagttcttcgacgttttgttgcgtatgtttaacgcgactcttcagatgagaaacagcgtgccgaataccgacaccgactacttggtcagcccggtgaaagctgaagacggcagctttttcgacagccgcgaggagtttaagaaaggtggcgatgcccgcctgccgatagactgcgatgctaatggtgcgtaccatattgccctgaaaggcttgtacttgttgttgaatgatttcaaccgtgataacaagggcgtcatccaaaacatctctaacaaggactggtttaaattcgtgcaggagaaagtttacaaagactaa

SEQ ID NO: 819 - DNA, 3882 bp, synthetic construct
  source 1..3882: mol_type = other DNA
atggctaggataattgatgaattttgtggacagatgaatggatacagccgttccatcacgctgcgtaaccgcctggtgccgatcggcaagaccgaggaaaatctgaaacagtttctggagaaggacttagagcgcgcaactgcgtacccggacatcaaaaacctgattgacgctatccatcgtaatgtcattgaggacaccttaagcaaagtggccctgaactggaacgaaatctttaatatcctcgcgacgtaccagaacgaaaaagataaaaagaaaaaggcggcgatcaaaaaggacctggagaagctccaaagcggtgcacgtaaaaagattgttgaggcattcaaaaagaacccggattttgaaaaactgttcaaagagggtctgtttaaagagttgctgcctgaactgatcaaaagcgcaccggttgatgaaatcgcggttaaaaccaaggcgctggaatgcttcaaccgttttagcacctatttcacgggtttccacgacaatcgcaaaaacatgtactcggaagaagctaaatctaccgcaattagctatcgcatcgtgaacgaaaatttcccgaaattttttgccaatatcaagttgttcaactatctgaaagagcactttccgcgaatcatcattgataccgaagagtccctgaaagactatttgaagggcaaaaagctggattctgtatttagcattgacggctttaacagcgtgctggcgcagagcgggattgatttctataacaccgtgataggcggtatttcaggtgaggccggcaccaaaaaaacgcagggtcttaacgagaagattaacttagcgcgccagcaattatccaaggaggagaagaacaagctgcgcggtaaaatggtggtgctgtttaaacagatcttgtctgatcgtgaaaccagcagctttatcccagtgggttttgccaacaaggaggaggtgtactctacggtgaaagaattcaacaactcgattgccgaaaaggcggtgtccaaggtgcgtgatctattcctgcaccgcgaagaattcacgctaaacgagattttcgtcccggcaaagagcttgaccgacttcagtcaggccatcttcggatcctggtctattttgagtgagggcctgttcctgctggagaaggacagcatgaaaaaggctctaagcgaatcccaagaagaaaagatcaataaggagattgcgaaaaaagactgctcctttaccgaactacaactggcgtacgagcgctactgcaccgagcacaacttgccggttgaaaaattctgcaaagactacttcgacatcgtcgattacaggggaaacggtgcgaaaagcgaaaaaacaaaagtgagcatcctgagcgaaatcctggaaacctttttacgattggactttgaccacattcaggacctgcaacaagaaaagaacgctgcgattcctatcaaagcatatcttgacgaagttcagaatttgtaccaccacctgaagttggtcgattatcgtggcgaagagcagaaagactcaaccttttatagcaaacacgatgaaatcctgaccgatctttctcagatcgtcccattgtataataaagtccgtaactttgttaccaaaaaactgggtgagagcaaaaagatcaagctgaacttcgattgcccgactctggctaatggctgggatgagaatcaagagtccagcaacgatgcaattatcctgagaaaggacggcaaatactatctgggcatttacaacccgaacaacaaaccgaaattcgcgaagaaggacagcatcgtgggtgattgctatgaaaaaatggcatacaagcaaatcgcactgccgatgggtttgggtgcatttgtgcgcaaatgctttggcaccgctcagaaatacggttggggttgcccggagaattgcctgaacagcgagggtaaaattatcatcaaagacgaggaggcgaagggtaatctggaggcaatcatcgactgttacaaagattttctgaacaagtacgaaaaggacggcttcaagtacaaggactacaatttttccttcctggactctgccagctatgaaaaactgtctgatttcttcaacgacgttaaaccgcagggctataagctgagctttacgtccatcccactgtcagagatcgataagatgattgatgaaggtaaactgtttttgtttcagatatataacaaagacttcgcgaagaaggcgacggggaagaagaacctgcataccctttattgggaaaacctattctcagtcgagaatctgcaagatgtggtgttgaagctcaatggcgaagccgagctgttctggcgtgaggctagcatcaaaaaggacaaggtgatcgttcacaaaaaaggttctattctggtgaatcgtaccaccacggatggtaagagcatcccggaggccatttatcaagaaatctatcaattaaaaaacaaaatggcggattccatcagcgacgaagcgaaacgccttctagagtccggcaccgttgtctgtaaagtcgccactcatgatatcgttaaggataaacattttactgaaaacacgtatctgttccattgtccgattaccatgaacttcaaggcaaaagaccgtaccaataaggaatttaacaatcatgttctggaggttcttaacaagaatccggatattaaggtgatcggcttagaccgtggcgaacgtcatctgctgtacctgagcctgatcaatcagaagggtgaaattgagtgccagaaaacgctgaacctagttgagcaagttcgtaatgataagaccgtttccgttaattatcatgaaaaactggtgcacaaagaaggcagccgtgatgctgcgagaaaaaactggcagaccattggcaatattaaagagctgaaggagggctacctgtcggcggtggtgcacgagattgcgagtctgatggtaaagcacaatgcgatcgttgtaatggaagacctgaatttcggctttaagcgcggtcgttttgctgtggagcgtcagatctaccaaaagttcgaaaacatgctgattgagaagctgaactatctggtttttaaagaccgtaaagtgacggagccgggtggcgttctgaacgcgtaccagttggcgaacaagagcgcgaaggtgacagatgtttataaacaatgcggttggctgttctatatcccggcagcgtacaccagcaaaattgatccgcgtaccggtttcgcgaatctgttcattaccaagggtctgaccaatgttgagaagaagaaggagtttttcggcaagttcgactcgattcgttatgatgcgaccgagtcttgtttcgttttttccttcgactacgcaaagatttgtgacaatgctgattacaagaagaaatgggatgtttacacccgtggtactcgtctcgtttacaacaagaccgaacgcaagaacgtgagcgtcaacccaaccgaagagttgcagtgtgtttttgatgagttcggcatcaagtggaataccggcgaagacctgattgaatctattagcctgatcccggcggaaaagtccaacgcgaagttcttcgacgttttgttgcgtatgtttaacgcgactcttcagatgagaaacagcgtgccgaataccgacaccgactacttggtcagcccggtgaaagctgaagacggcagctttttcgacagccgcgaggagtttaagaaaggtggcgatgcccgcctgccgatagactgcgatgctaatggtgcgtaccatattgccctgaaaggcttgtacttgttgttgaatgatttcaaccgtgataacaagggcgtcatccaaaacatctctaacaaggactggtttaaattcgtgcaggagaaagtttacaaagactaa

SEQ ID NO: 820 - DNA, 3882 bp, synthetic construct
  source 1..3882: mol_type = other DNA
atggctaggataattgatgaattttgtggacagatgaatggatacagccgttccatcacgctgcgtaaccgcctggtgccgatcggcaagaccgaggaaaatctgaaacagtttctggagaaggacttagagcgcgcaactgcgtacccggacatcaaaaacctgattgacgctatccatcgtaatgtcattgaggacaccttaagcaaagtggccctgaactggaacgaaatctttaatatcctcgcgacgtaccagaacgaaaaagataaaaagaaaaaggcggcgatcaaaaaggacctggagaagctccaaagcggtgcacgtaaaaagattgttgaggcattcaaaaagaacccggattttgaaaaactgttcaaagagggtctgtttaaagagttgctgcctgaactgatcaaaagcgcaccggttgatgaaatcgcggttaaaaccaaggcgctggaatgcttcaaccgttttagcacctatttcacgggtttccacgacaatcgcaaaaacatgtactcggaagaagctaaatctaccgcaattagctatcgcatcgtgaacgaaaatttcccgaaattttttgccaatatcaagttgttcaactatctgaaagagcactttccgcgaatcatcattgataccgaagagtccctgaaagactatttgaagggcaaaaagctggattctgtatttagcattgacggctttaacagcgtgctggcgcagagcgggattgatttctataacaccgtgataggcggtatttcaggtgaggccggcaccaaaaaaacgcagggtcttaacgagaagattaacttagcgcgccagcaattatccaaggaggagaagaacaagctgcgcggtaaaatggtggtgctgtttaaacagatcttgtctgatcgtgaaaccagcagctttatcccagtgggttttgccaacaaggaggaggtgtactctacggtgaaagaattcaacaactcgattgccgaaaaggcggtgtccaaggtgcgtgatctattcctgcaccgcgaagaattcacgctaaacgagattttcgtcccggcaaagagcttgaccgacttcagtcaggccatcttcggatcctggtctattttgagtgagggcctgttcctgctggagaaggacagcatgaaaaaggctctaagcgaatcccaagaagaaaagatcaataaggagattgcgaaaaaagactgctcctttaccgaactacaactggcgtacgagcgctactgcaccgagcacaacttgccggttgaaaaattctgcaaagactacttcgacatcgtcgattacaggggaaacggtgcgaaaagcgaaaaaacaaaagtgagcatcctgagcgaaatcctggaaacctttttacaattggactttgaccacattcaggacctgcaacaagaaaagaacgctgcgattcctatcaaagcatatcttgacgaagttcagaatttgtaccaccacctgaagttggtcgattatcgtggcgaagagcagaaagactcaaccttttatagcaaacacgatgaaatcctgaccgatctttctcagatcgtcccattgtataataaagtccgtaacattgttaccaaaaaactgggtgagagcaaaaagatcaagctgaacttcgattgcccgactctggctaatggctgggatgagaatcaagagtccagcaacgatgcaattatcctgagaaaggacggcaaatactatctgggcatttacaacccgaacaacaaaccgaaattcgcgaagaaggacagcatcgtgggtgattgctatgaaaaaatggcatacaagcaaatcgcactgccgatgggtttgggtgcatttgtgcgcaaatgctttggcaccgctcagaaatacggttggggttgcccggagaattgcctgaacagcgagggtaaaattatcatcaaagacgaggaggcgaagggtaatctggaggcaatcatcgactgttacaaagattttctgaacaagtacgaaaaggacggcttcaagtacaaggactacaatttttccttcctggactctgccagctatgaaaaactgtctgatttcttcaacgacgttaaaccgcagggctataagctgagctttacgtccatcccactgtcagagatcgataagatgattgatgaaggtaaactgtttttgtttcagatatataacaaagacttcgcgaagaaggcgacggggaagaagaacctgcataccctttattgggaaaacctattctcagtcgagaatctgcaagatgtggtgttgaagctcaatggcgaagccgagctgttctggcgtgaggctagcatcaaaaaggacaaggtgatcgttcacaaaaaaggttctattctggtgaatcgtaccaccacggatggtaagagcatcccggaggccatttatcaagaaatctatcaattaaaaaacaaaatggcggattccatcagcgacgaagcgaaacgccttctagagtccggcaccgttgtctgtaaagtcgccactcatgatatcgttaaggataaacattttactgaaaacacgtatctgttccattgtccgattaccatgaacttcaaggcaaaagaccgtaccaataaggaatttaacaatcatgttctggaggttcttaacaagaatccggatattaaggtgatcggcttagaccgtggcgaacgtcatctgctgtacctgagcctgatcaatcagaagggtgaaattgagtgccagaaaacgctgaacctagttgagcaagttcgtaatgataagaccgtttccgttaattatcatgaaaaactggtgcacaaagaaggcagccgtgatgctgcgagaaaaaactggcagaccattggcaatattaaagagctgaaggagggctacctgtcggcggtggtgcacgagattgcgagtctgatggtaaagcacaatgcgatcgttgtaatggaagacctgaatttcggctttaagcgcggtcgttttgctgtggagcgtcagatctaccaaaagttcgaaaacatgctgattgagaagctgaactatctggtttttaaagaccgtaaagtgacggagccgggtggcgttctgaacgcgtaccagttggcgaacaagagcgcgaaggtgacagatgtttataaacaatgcggttggctgttctatatcccggcagcgtacaccagcaaaattgatccgcgtaccggtttcgcgaatctgttcattaccaagggtctgaccaatgttgagaagaagaaggagtttttcggcaagttcgactcgattcgttatgatgcgaccgagtcttgtttcgttttttccttcgactacgcaaagatttgtgacaatgctgattacaagaagaaatgggatgtttacacccgtggtactcgtctcgtttacaacaagaccgaacgcaagaacgtgagcgtcaacccaaccgaagagttgcagtgtgtttttgatgagttcggcatcaagtggaataccggcgaagacctgattgaatctattagcctgatcccggcggaaaagtccaacgcgaagttcttcgacgttttgttgcgtatgtttaacgcgactcttcagatgagaaacagcgtgccgaataccgacaccgactacttggtcagcccggtgaaagctgaagacggcagctttttcgacagccgcgaggagtttaagaaaggtggcgatgcccgcctgccgatagactgcgatgctaatggtgcgtaccatattgccctgaaaggcttgtacttgttgttgaatgatttcaaccgtgataacaagggcgtcatccaaaacatctctaacaaggactggtttaaattcgtgcaggagaaagtttacaaagactaa

SEQ ID NO: 821 - DNA, 3882 bp, synthetic construct
  source 1..3882: mol_type = other DNA
atggctaggataattgatgaattttgtggacagatgaatggatacagccgttccatcacgctgcgtaaccgcctggtgccgatcggcaagaccgaggaaaatctgaaacagtttctggagaaggacttagagcgcgcaactgcgtacccggacatcaaaaacctgattgacgctatccatcgtaatgtcattgaggacaccttaagcaaagtggccctgaactggaacgaaatctttaatatcctcgcgacgtaccagaacgaaaaagataaaaagaaaaaggcggcgatcaaaaaggacctggagaagctccaaagcggtgcacgtaaaaagattgttgaggcattcaaaaagaacccggattttgaaaaactgttcaaagagggtctgtttaaagagttgctgcctgaactgatcaaaagcgcaccggttgatgaaatcgcggttaaaaccaaggcgctggaatgcttcaaccgttttagcacctatttcacgggtttccacgacaatcgcaaaaacatgtactcggaagaagctaaatctaccgcaattagctatcgcatcgtgaacgaaaatttcccgaaattttttgccaatatcaagttgttcaactatctgaaagagcactttccgcgaatcatcattgataccgaagagtccctgaaagactatttgaagggcaaaaagctggattctgtatttagcattgacggctttaacagcgtgctggcgcagagcgggattgatttctataacaccgtgataggcggtatttcaggtgaggccggcaccaaaaaaacgcagggtcttaacgagaagattaacttagcgcgccagcaattatccaaggaggagaagaacaagctgcgcggtaaaatggtggtgctgtttaaacagatcttgtctgatcgtgaaaccagcagctttatcccagtgggttttgccaacaaggaggaggtgtactctacggtgaaagaattcaacaactcgattgccgaaaaggcggtgtccaaggtgcgtgatctattcctgcaccgcgaagaattcacgctaaacgagattttcgtcccggcaaagagcttgaccgacttcagtcaggccatcttcggatcctggtctattttgagtgagggcctgttcctgctggagaaggacagcatgaaaaaggctctaagcgaatcccaagaagaaaagatcaataaggagattgcgaaaaaagactgctcctttaccgaactacaactggcgtacgagcgctactgcaccgagcacaacttgccggttgaaaaattctgcaaagactacttcgacatcgtcgattacaggggaaacggtgcgaaaagcgaaaaaacaaaagtgagcatcctgagcgaaatcctggaaacctttttacaattggactttgaccacattcaggacctgcaacaagaaaagaacgctgcgattcctatcaaagcatatcttgacgaagttcagaatttgtaccaccacctgaagttggtcgattatcgtggcgaagagcagaaagactcaaccttttatagcaaacacgatgaaatcctgaccgatctttctcagatcgtcccattgtataataaagtccgtaactttgttaccaaaaaactgggtgagagcaaaaagatcaagctgaacttcgattgcccgactctggctaatggctgggatgagaatcaagagtccagcaacgatgcaattatcctgagaaaggacggcaaatactatctgggcatttacaacccgaacaacaaaccgaaattcgcgaagaaggacagcatcgtgggtgattgctatgaaaaaatggcatacaagcaaatcgcactgccgatgggtttgggtgcatttgtgcgcaaatgctttggcaccgctcagaaatacggttggggttgcccggagaattgcctgaacagcgagggtaaaattatcatcaaagacgaggaggcgaagggtaatctggaggcaatcatcgactgttacaaagattttctgaacaagtacgaaaaggacggcttcaagtacaaggactacaatttttccttcctggactctgccagctatgaaaaactgtctgatttcttcaacgacgttaaaccgcagggctataagctgagctttacgtccatcccactgtcagagatcgataagatgattgatgaaggtaaactgtttttgtttcagatatataacaaagacttcgcgaagaaggcgacggggatgaagaacctgcataccctttattgggaaaacctattctcagtcgagaatctgcaagatgtggtgttgaagctcaatggcgaagccgagctgttctggcgtgaggctagcatcaaaaaggacaaggtgatcgttcacaaaaaaggttctattctggtgaatcgtaccaccacggatggtaagagcatcccggaggccatttatcaagaaatctatcaattaaaaaacaaaatggcggattccatcagcgacgaagcgaaacgccttctagagtccggcaccgttgtctgtaaagtcgccactcatgatatcgttaaggataaacattttactgaaaacacgtatctgttccattgtccgattaccatgaacttcaaggcaaaagaccgtaccaataaggaatttaacaatcatgttctggaggttcttaacaagaatccggatattaaggtgatcggcttagaccgtggcgaacgtcatctgctgtacctgagcctgatcaatcagaagggtgaaattgagtgccagaaaacgctgaacctagttgagcaagttcgtaatgataagaccgtttccgttaattatcatgaaaaactggtgcacaaagaaggcagccgtgatgctgcgagaaaaaactggcagaccattggcaatattaaagagctgaaggagggctacctgtcggcggtggtgcacgagattgcgagtctgatggtaaagcacaatgcgatcgttgtaatggaagacctgaatttcggctttaagcgcggtcgttttgctgtggagcgtcagatctaccaaaagttcgaaaacatgctgattgagaagctgaactatctggtttttaaagaccgtaaagtgacggagccgggtggcgttctgaacgcgtaccagttggcgaacaagagcgcgaaggtgacagatgtttataaacaatgcggttggctgttctatatcccggcagcgtacaccagcaaaattgatccgcgtaccggtttcgcgaatctgttcattaccaagggtctgaccaatgttgagaagaagaaggagtttttcggcaagttcgactcgattcgttatgatgcgaccgagtcttgtttcgttttttccttcgactacgcaaagatttgtgacaatgctgattacaagaagaaatgggatgtttacacccgtggtactcgtctcgtttacaacaagaccgaacgcaagaacgtgagcgtcaacccaaccgaagagttgcagtgtgtttttgatgagttcggcatcaagtggaataccggcgaagacctgattgaatctattagcctgatcccggcggaaaagtccaacgcgaagttcttcgacgttttgttgcgtatgtttaacgcgactcttcagatgagaaacagcgtgccgaataccgacaccgactacttggtcagcccggtgaaagctgaagacggcagctttttcgacagccgcgaggagtttaagaaaggtggcgatgcccgcctgccgatagactgcgatgctaatggtgcgtaccatattgccctgaaaggcttgtacttgttgttgaatgatttcaaccgtgataacaagggcgtcatccaaaacatctctaacaaggactggtttaaattcgtgcaggagaaagtttacaaagactaa

SEQ ID NO: 822 - DNA, 3882 bp, synthetic construct
  source 1..3882: mol_type = other DNA
atggctaggataattgatgaattttgtggacagatgaatggatacagccgttccatcacgctgcgtaaccgcctggtgccgatcggcaagaccgaggaaaatctgaaacagtttctggagaaggacttagagcgcgcaactgcgtacccggacatcaaaaacctgattgacgctatccatcgtaatgtcattgaggacaccttaagcaaagtggccctgaactggaacgaaatctttaatatcctcgcgacgtaccagaacgaaaaagataaaaagaaaaaggcggcgatcaaaaaggacctggagaagctccaaagcggtgcacgtaaaaagattgttgaggcattcaaaaagaacccggattttgaaaaactgttcaaagagggtctgtttaaagagttgctgcctgaactgatcaaaagcgcaccggttgatgaaatcgcggttaaaaccaaggcgctggaatgcttcaaccgttttagcacctatttcacgggtttccacgacaatcgcaaaaacatgtactcggaagaagctaaatctaccgcaattagctatcgcatcgtgaacgaaaatttcccgaaattttttgccaatatcaagttgttcaactatctgaaagagcactttccgcgaatcatcattgataccgaagagtccctgaaagactatttgaagggcaaaaagctggattctgtatttagcattgacggctttaacagcgtgctggcgcagagcgggattgatttctataacaccgtgataggcggtatttcaggtgaggccggcaccaaaaaaacgcagggtcttaacgagaagattaacttagcgcgccagcaattatccaaggaggagaagaacaagctgcgcggtaaaatggtggtgctgtttaaacagatcttgtctgatcgtgaaaccagcagctttatcccagtgggttttgccaacaaggaggaggtgtactctacggtgaaagaattcaacaactcgattgccgaaaaggcggtgtccaaggtgcgtgatctattcctgcaccgcgaagaattcacgctaaacgagattttcgtcccggcaaagagcttgaccgacttcagtcaggccatcttcggatcctggtctattttgagtgagggcctgttcctgctggagaaggacagcatgaaaaaggctctaagcgaatcccaagaagaaaagatcaataaggagattgcgaaaaaagactgctcctttaccgaactacaactggcgtacgagcgctactgcaccgagcacaacttgccggttgaaaaattctgcaaagactacttcgacatcgtcgattacaggggaaacggtgcgaaaagcgaaaaaacaaaagtgagcatcctgagcgaaatcctggaaacctttttacaattggactttgaccacattcaggacctgcaacaagaaaagaacgctgcgattcctatcaaagcatatcttgacgaagttcagaatttgtaccaccacctgaagttggtcgattatcgtggcgaagagcagaaagactcaaccttttatagcaaacacgatgaaatcctgaccgatctttctcagatcgtcccattgtataataaagtccgtaactttgttaccaaaaaactgggtgagagcaaaaagatcaagctgaacttcgattgcccgactctggctaatggctgggatgagaatcaagagtccagcaacgatgcaattatcctgagaaaggacggcaaatactatctgggcatttacaacccgaacaacaaaccgaaattcgcgaagaaggacagcatcgtgggtgattgctatgaaaaaatggcatacaagcaaatcgcactgccgatgggtttgggtgcatttgtgcgcaaatgctttggcaccgctcagaaatacggttggggttgcccggagaattgcctgaacagcgagggtaaaattatcatcaaagacgaggaggcgaagggtaatctggaggcaatcatcgactgttacaaagattttctgaacaagtacgaaaaggacggcttcaagtacaaggactacaatttttccttcctggactctgccagctatgaaaaactgtctgatttcttcaacgacgttaaaccgcagggctataagctgagctttacgtccatcccactgtcagagatcgataagatgattgatgaaggtaaactgtttttgtttcagatatataacaaagacttcgcgaagaaggcgacggggaagaagaacctgcataccctttattgggaaaacctattctcagtcgagaatctgcaagatgtggtgttgaagctcaatggcgaagccgagctgttctggcgtgaggctagcatcaaaaaggacaaggtgatcgttcacaaaaaaggttctattctggtgaatcgtaccaccacggatggtaagagcatcccggaggccatttatcaagaaatctatcaattaaaaaacaaaatggcggattccatcagcgacgaagcgaaacgccttctagagtccggctccgttgtctgtaaagtcgccactcatgatatcgttaaggataaacattttactgaaaacacgtatctgttccattgtccgattaccatgaacttcaaggcaaaagaccgtaccaataaggaatttaacaatcatgttctggaggttcttaacaagaatccggatattaaggtgatcggcttagaccgtggcgaacgtcatctgctgtacctgagcctgatcaatcagaagggtgaaattgagtgccagaaaacgctgaacctagttgagcaagttcgtaatgataagaccgtttccgttaattatcatgaaaaactggtgcacaaagaaggcagccgtgatgctgcgagaaaaaactggcagaccattggcaatattaaagagctgaaggagggctacctgtcggcggtggtgcacgagattgcgagtctgatggtaaagcacaatgcgatcgttgtaatggaagacctgaatttcggctttaagcgcggtcgttttgctgtggagcgtcagatctaccaaaagttcgaaaacatgctgattgagaagctgaactatctggtttttaaagaccgtaaagtgacggagccgggtggcgttctgaacgcgtaccagttggcgaacaagagcgcgaaggtgacagatgtttataaacaatgcggttggctgttctatatcccggcagcgtacaccagcaaaattgatccgcgtaccggtttcgcgaatctgttcattaccaagggtctgaccaatgttgagaagaagaaggagtttttcggcaagttcgactcgattcgttatgatgcgaccgagtcttgtttcgttttttccttcgactacgcaaagatttgtgacaatgctgattacaagaagaaatgggatgtttacacccgtggtactcgtctcgtttacaacaagaccgaacgcaagaacgtgagcgtcaacccaaccgaagagttgcagtgtgtttttgatgagttcggcatcaagtggaataccggcgaagacctgattgaatctattagcctgatcccggcggaaaagtccaacgcgaagttcttcgacgttttgttgcgtatgtttaacgcgactcttcagatgagaaacagcgtgccgaataccgacaccgactacttggtcagcccggtgaaagctgaagacggcagctttttcgacagccgcgaggagtttaagaaaggtggcgatgcccgcctgccgatagactgcgatgctaatggtgcgtaccatattgccctgaaaggcttgtacttgttgttgaatgatttcaaccgtgataacaagggcgtcatccaaaacatctctaacaaggactggtttaaattcgtgcaggagaaagtttacaaagactaa

SEQ ID NO: 823 - DNA, 3882 bp, synthetic construct
  source 1..3882: mol_type = other DNA
atggctaggataattgatgaattttgtggacagatgaatggatacagccgttccatcacgctgcgtaaccgcctggtgccgatcggcaagaccgaggaaaatctgaaacagtttctggagaaggacttagagcgcgcaactgcgtacccggacatcaaaaacctgattgacgctatccatcgtaatgtcattgaggacaccttaagcaaagtggccctgaactggaacgaaatctttaatatcctcgcgacgtaccagaacgaaaaagataaaaagaaaaaggcggcgatcaaaaaggacctggagaagctccaaagcggtgcacgtaaaaagattgttgaggcattcaaaaagaacccggattttgaaaaactgttcaaagagggtctgtttaaagagttgctgcctgaactgatcaaaagcgcaccggttgatgaaatcgcggttaaaaccaaggcgctggaatgcttcaaccgttttagcacctatttcacgggtttccacgacaatcgcaaaaacatgtactcggaagaagctaaatctaccgcaattagctatcgcatcgtgaacgaaaatttcccgaaattttttgccaatatcaagttgttcaactatctgaaagagcactttccgcgaatcatcattgataccgaagagtccctgaaagactatttgaagggcaaaaagctggattctgtatttagcattgacggctttaacagcgtgctggcgcagagcgggattgatttctataacaccgtgataggcggtatttcaggtgaggccggcaccaaaaaaacgcagggtcttaacgagaagattaacttagcgcgccagcaattatccaaggaggagaagaacaagctgcgcggtaaaatggtggtgctgtttaaacagatcttgtctgatcgtgaaaccagcagctttatcccagtgggttttgccaacaaggaggaggtgtactctacggtgaaagaattcaacaactcgattgccgaaaaggcggtgtccaaggtgcgtgatctattcctgcaccgcgaagaattcacgctaaacgagattttcgtcccggcaaagagcttgaccgacttcagtcaggccatcttcggatcctggtctattttgagtgagggcctgttcctgctggagaaggacagcatgaaaaaggctctaagcgaatcccaagaagaaaagatcaataaggagattgcgaaaaaagactgctcctttaccgaactacaactggcgtacgagcgctactgcaccgagcacaacttgccggttgaaaaattctgcaaagactacttcgacatcgtcgattacaggggaaacggtgcgaaaagcgaaaaaacaaaagtgagcatcctgagcgaaatcctggaaacctttttacaattggactttgaccacattcaggacctgcaacaagaaaagaacgctgcgattcctatcaaagcatatcttgacgaagttcagaatttgtaccaccacctgaagttggtcgattatcgtggcgaagagcagaaagactcaaccttttatagcaaacacgatgaaatcctgaccgatctttctcagatcgtcccattgtataataaagtccgtaactttgttaccaaaaaactgggtgagagcaaaaagatcaagctgaacttcgattgcccgactctggctaatggctgggatgagaatcaagagtccagcaacgatgcaattatcctgagaaaggacggcaaatactatctgggcatttacaacccgaacaacaaaccgaaattcgcgaagaaggacagcatcgtgggtgattgctatgaaaaaatggcatacaagcaaatcgcactgccgatgggtttgggtgcatttgtgcgcaaatgctttggcaccgctcagaaatacggttggggttgcccggagaattgcctgaacagcgagggtaaaattatcatcaaagacgaggaggcgaagggtaatctggaggcaatcatcgactgttacaaagattttctgaacaagtacgaaaaggacggcttcaagtacaaggactacaatttttccttcctggactctgccagctatgaaaaactgtctgatttcttcaacgacgttaaaccgcagggctataagctgagctttacgtccatcccactgtcagagatcgataagatgattgatgaaggtaaactgtttttgtttcagatatatatcaaagacttcgcgaagaaggcgacggggaagaagaacctgcataccctttattgggaaaacctattctcagtcgagaatctgcaagatgtggtgttgaagctcaatggcgaagccgagctgttctggcgtgaggctagcatcaaaaaggacaaggtgatcgttcacaaaaaaggttctattctggtgaatcgtaccaccacggatggtaagagcatcccggaggccatttatcaagaaatctatcaattaaaaaacaaaatggcggattccatcagcgacgaagcgaaacgccttctagagtccggcaccgttgtctgtaaagtcgccactcatgatatcgttaaggataaacattttactgaaaacacgtatctgttccattgtccgattaccatgaacttcaaggcaaaagaccgtaccaataaggaatttaacaatcatgttctggaggttcttaacaagaatccggatattaaggtgatcggcttagaccgtggcgaacgtcatctgctgtacctgagcctgatcaatcagaagggtgaaattgagtgccagaaaacgctgaacctagttgagcaagttcgtaatgataagaccgtttccgttaattatcatgaaaaactggtgcacaaagaaggcagccgtgatgctgcgagaaaaaactggcagaccattggcaatattaaagagctgaaggagggctacctgtcggcggtggtgcacgagattgcgagtctgatggtaaagcacaatgcgatcgttgtaatggaagacctgaatttcggctttaagcgcggtcgttttgctgtggagcgtcagatctaccaaaagttcgaaaacatgctgattgagaagctgaactatctggtttttaaagaccgtaaagtgacggagccgggtggcgttctgaacgcgtaccagttggcgaacaagagcgcgaaggtgacagatgtttataaacaatgcggttggctgttctatatcccggcagcgtacaccagcaaaattgatccgcgtaccggtttcgcgaatctgttcattaccaagggtctgaccaatgttgagaagaagaaggagtttttcggcaagttcgactcgattcgttatgatgcgaccgagtcttgtttcgttttttccttcgactacgcaaagatttgtgacaatgctgattacaagaagaaatgggatgtttacacccgtggtactcgtctcgtttacaacaagaccgaacgcaagaacgtgagcgtcaacccaaccgaagagttgcagtgtgtttttgatgagttcggcatcaagtggaataccggcgaagacctgattgaatctattagcctgatcccggcggaaaagtccaacgcgaagttcttcgacgttttgttgcgtatgtttaacgcgactcttcagatgagaaacagcgtgccgaataccgacaccgactacttggtcagcccggtgaaagctgaagacggcagctttttcgacagccgcgaggagtttaagaaaggtggcgatgcccgcctgccgatagactgcgatgctaatggtgcgtaccatattgccctgaaaggcttgtacttgttgttgaatgatttcaaccgtgataacaagggcgtcatccaaaacatctctaacaaggactggtttaaattcgtgcaggagaaagtttacaaagactaa

SEQ ID NO: 824 - DNA, 3882 bp, synthetic construct
  source 1..3882: mol_type = other DNA
atggctaggataattgatgaattttgtggacagatgaatggatacagccgttccatcacgctgcgtaaccgcctggtgccgatcggcaagaccgaggaaaatctgaaacagtttctggagaaggacttagagcgcgcaactgcgtacccggacatcaaaaacctgattgacgctatccatcgtaatgtcattgaggacaccttaagcaaagtggccctgaactggaacgaaatctttaatatcctcgcgacgtaccagaacgaaaaagataaaaagaaaaaggcggcgatcaaaaaggacctggagaagctccaaagcggtgcacgtaaaaagattgttgaggcattcaaaaagaacccggattttgaaaaactgttcaaagagggtctgtttaaagagttgctgcctgaactgatcaaaagcgcaccggttgatgaaatcgcggttaaaaccaaggcgctggaatgcttcaaccgttttagcacctatttcacgggtttccacgacaatcgcaaaaacatgtactcggaagaagctaaatctaccgcaattagctatcgcatcgtgaacgaaaatttcccgaaattttttgccaatatcaagttgttcaactatctgaaagagcactttccgcgaatcatcattgataccgaagagtccctgaaagactatttgaagggcaaaaagctggattctgtatttagcattgacggctttaacagcgtgctggcgcagagcgggattgatttctataacaccgtgataggcggtatttcaggtgaggccggcaccaaaaaaacgcagggtcttaacgagaagattaacttagcgcgccagcaattatccaaggaggagaagaacaagctgcgcggtaaaatggtggtgctgtttaaacagatcttgtctgatcgtgaaaccagcagctttatcccagtgggttttgccaacaaggaggaggtgtactctacggtgaaagaattcaacaactcgattgccgaaaaggcggtgtccaaggtgcgtgatctattcctgcaccgcgaagaattcacgctaaacgagattttcgtcccggcaaagagcttgaccgacttcagtcaggccatcttcggatcctggtctattttgagtgagggcctgttcctgctggagaaggacagcatgaaaaaggctctaagcgaatcccaagaagaaaagatcaataaggagattgcgaaaaaagactgctcctttaccgaactacaactggcgtacgagcgctactgcaccgagcacaacttgccggttgaaaaattctgcaaagactacttcgacatcgtcgattacaggggaaacggtgcgaaaagcgaaaaaacaaaagtgagcatcctgagcgaaatcctggaaacctttttacaattggactttgaccacattcaggacctgcaacaagaaaagaacgctgcgattcctatcaaagcatatcttgacgaagttcagaatttgtaccaccacctgaagttggtcgattatcgtggcgaagagcagaaagactcaaccttttatagcaaacacgatgaaatcctgaccgatctttctcagatcgtcccattgtataataaagtccgtaactttgttaccaaaaaactgggtgagagcaaaaagatcaagctgaacttcgattgcccgactctggctaatggctgggatgagaatcaagagtccagcaacgatgcaattatcctgagaaaggacggcaaatactatctgggcatttacaacccgaacaacaaaccgaaattcgcgaagaaggacagcatcgtgggtgattgctatgaaaaaatggcatacaagcaaatcgcactgccgatgggtttgggtgcatttgtgcgcaaatgctttggcaccgctcagaaatacggttggggttgcccggagaattgcctgaacagcgagggtaaaattatcatcaaagacgaggaggcgaagggtaatctggaggcaatcatcgactgttacaaagattttctgaacaagtacgaaaaggacggcttcaagtacaaggactacaatttttccttcctggactctgccagctatgaaaaactgtctgatttcttcaacgacgttaaaccgcagggctataagctgagctttacgtccatcccactgtcagagatcgataagatggttgatgaaggtaaactgtttttgtttcagatatataacaaagacttcgcgaagaaggcgacggggaagaagaacctgcataccctttattgggaaaacctattctcagtcgagaatctgcaagatgtggtgttgaagctcaatggcgaagccgagctgttctggcgtgaggctagcatcaaaaaggacaaggtgatcgttcacaaaaaaggttctattctggtgaatcgtaccaccacggatggtaagagcatcccggaggccatttatcaagaaatctatcaattaaaaaacaaaatggcggattccatcagcgacgaagcgaaacgccttctagagtccggcaccgttgtctgtaaagtcgccactcatgatatcgttaaggataaacattttactgaaaacacgtatctgttccattgtccgattaccatgaacttcaaggcaaaagaccgtaccaataaggaatttaacaatcatgttctggaggttcttaacaagaatccggatattaaggtgatcggcttagaccgtggcgaacgtcatctgctgtacctgagcctgatcaatcagaagggtgaaattgagtgccagaaaacgctgaacctagttgagcaagttcgtaatgataagaccgtttccgttaattatcatgaaaaactggtgcacaaagaaggcagccgtgatgctgcgagaaaaaactggcagaccattggcaatattaaagagctgaaggagggctacctgtcggcggtggtgcacgagattgcgagtctgatggtaaagcacaatgcgatcgttgtaatggaagacctgaatttcggctttaagcgcggtcgttttgctgtggagcgtcagatctaccaaaagttcgaaaacatgctgattgagaagctgaactatctggtttttaaagaccgtaaagtgacggagccgggtggcgttctgaacgcgtaccagttggcgaacaagagcgcgaaggtgacagatgtttataaacaatgcggttggctgttctatatcccggcagcgtacaccagcaaaattgatccgcgtaccggtttcgcgaatctgttcattaccaagggtctgaccaatgttgagaagaagaaggagtttttcggcaagttcgactcgattcgttatgatgcgaccgagtcttgtttcgttttttccttcgactacgcaaagatttgtgacaatgctgattacaagaagaaatgggatgtttacacccgtggtactcgtctcgtttacaacaagaccgaacgcaagaacgtgagcgtcaacccaaccgaagagttgcagtgtgtttttgatgagttcggcatcaagtggaataccggcgaagacctgattgaatctattagcctgatcccggcggaaaagtccaacgcgaagttcttcgacgttttgttgcgtatgtttaacgcgactcttcagatgagaaacagcgtgccgaataccgacaccgactacttggtcagcccggtgaaagctgaagacggcagctttttcgacagccgcgaggagtttaagaaaggtggcgatgcccgcctgccgatagactgcgatgctaatggtgcgtaccatattgccctgaaaggcttgtacttgttgttgaatgatttcaaccgtgataacaagggcgtcatccaaaacatctctaacaaggactggtttaaattcgtgcaggagaaagtttacaaagactaa

SEQ ID NO: 825 - DNA, 3882 bp, synthetic construct
  source 1..3882: mol_type = other DNA
atggctaggataattgatgaattttgtggacagatgaatggatacagccgttccatcacgctgcgtaaccgcctggtgccgatcggcaagaccgaggaaaatctgaaacagtttctggagaaggacttagagcgcgcaactgcgtacccggacatcaaaaacctgattgacgctatccatcgtaatgtcattgaggacaccttaagcaaagtggccctgaactggaacgaaatctttaatatcctcgcgacgtaccagaacgaaaaagataaaaagaaaaaggcggcgatcaaaaaggacctggagaagctccaaagcggtgcacgtaaaaagattgttgaggcattcaaaaagaacccggattttgaaaaactgttcaaagagggtctgtttaaagagttgctgcctgaactgatcaaaagcgcaccggttgatgaaatcgcggttaaaaccaaggcgctggaatgcttcaaccgttttagcacctatttcacgggtttccacgacaatcgcaaaaacatgtactcggaagaagctaaatctaccgcaattagctatcgcatcgtgaacgaaaatttcccgaaattttttgccaatatcaagttgttcaactatctgaaagagcactttccgcgaatcatcattgataccgaagagtccctgaaagactatttgaagggcaaaaagctggattctgtatttagcattgacggctttaacagcgtgctggcgcagagcgggattgatttctataacaccgtgataggcggtatttcaggtgaggccggcaccaaaaaaacgcagggtcttaacgagaagattaacttagcgcgccagcaattatccaaggaggagaagaacaagctgcgcggtaaaatggtggtgctgtttaaacagatcttgtctgatcgtgaaaccagcagctttatcccagtgggttttgccaacaaggaggaggtgtactctacggtgaaagaattcaacaactcgattgccgaaaaggcggtgtccaaggtgcgtgatctattcctgcaccgcgaagaattcacgctaaacgagattttcgtcccggcaaagagcttgaccgacttcagtcaggccatcttcggatcctggtctattttgagtgagggcctgttcctgctggagaaggacagcatgaaaaaggctctaagcgaatcccaagaagaaaagatcaataaggagattgcgaaaaaagactgctcctttaccgaactacaactggcgtacgagcgctactgcaccgagcacaacttgccggttgaaaaattctgcaaagactacttcgacatcgtcgattacaggggaaacggtgcgaaaagcgaaaaaacaaaagtgagcatcctgagcgaaatcctggaaacctttttacaattggactttgaccacattcaggacctgcaacaagaaaagaacgctgcgattcctatcaaagcatatcttgacgaagttcagaatttgtaccaccacctgaagttggtcgattatcgtggcgaagagcagaaagactcaaccttttatagcaaacacgatgaaatcctgaccgatctttctcagatcgtcccattgtataataaagtccgtaactttgttaccaaaaaactgggtgagagcaaaaagatcaagctgaacttcgattgcccgactctggctaatggctgggatgagaatcaagagtccagcaacgatgcaattatcctgagaaaggacggcaaatactatctgggcatttacaacccgaacaacaaaccgaaattcgcgaagaaggacagcatcgtgggtgattgctatgaaaaaatggcatacaagcaaatcgcactgccgatgggtttgggtgcatttgtgcgcaaatgctttggcaccgctcagaaatacggttggggttgcccggagaattgcctgaacagcgagggtaaaattatcatcaaagacgaggaggcgaagggtaatctggaggcaatcatcgactgttacaaagattttctgaacaagtacgaaaaggacggcttcaagtacaaggactacaatttttccttcctggactctgccagctatgaaaaactgtctgatttcttcaacgacgttaaaccgcagggctataagctgagctttacgtccatcccactgtcagagatcgataagatgattgatgaaggtaaactgtttttgtttcagatatataacaaagacttcgcgaagaaggcgacggggaagaagaacctgcataccctttattgggaaaacctattctcagtcgagaatctgcaagatgtggtgttgaagctcaatggcgaagccgagctgttctggcgtgaggctagcatcaaaaaggacaaggtgatcgttcacaaaaaaggttctattctggtgaatcgtaccaccacggatggtaagagcatcccggaggccatttatcaagaaatctatcaattaaaaaacataatggcggattccatcagcgacgaagcgaaacgccttctagagtccggcaccgttgtctgtaaagtcgccactcatgatatcgttaaggataaacattttactgaaaacacgtatctgttccattgtccgattaccatgaacttcaaggcaaaagaccgtaccaataaggaatttaacaatcatgttctggaggttcttaacaagaatccggatattaaggtgatcggcttagaccgtggcgaacgtcatctgctgtacctgagcctgatcaatcagaagggtgaaattgagtgccagaaaacgctgaacctagttgagcaagttcgtaatgataagaccgtttccgttaattatcatgaaaaactggtgcacaaagaaggcagccgtgatgctgcgagaaaaaactggcagaccattggcaatattaaagagctgaaggagggctacctgtcggcggtggtgcacgagattgcgagtctgatggtaaagcacaatgcgatcgttgtaatggaagacctgaatttcggctttaagcgcggtcgttttgctgtggagcgtcagatctaccaaaagttcgaaaacatgctgattgagaagctgaactatctggtttttaaagaccgtaaagtgacggagccgggtggcgttctgaacgcgtaccagttggcgaacaagagcgcgaaggtgacagatgtttataaacaatgcggttggctgttctatatcccggcagcgtacaccagcaaaattgatccgcgtaccggtttcgcgaatctgttcattaccaagggtctgaccaatgttgagaagaagaaggagtttttcggcaagttcgactcgattcgttatgatgcgaccgagtcttgtttcgttttttccttcgactacgcaaagatttgtgacaatgctgattacaagaagaaatgggatgtttacacccgtggtactcgtctcgtttacaacaagaccgaacgcaagaacgtgagcgtcaacccaaccgaagagttgcagtgtgtttttgatgagttcggcatcaagtggaataccggcgaagacctgattgaatctattagcctgatcccggcggaaaagtccaacgcgaagttcttcgacgttttgttgcgtatgtttaacgcgactcttcagatgagaaacagcgtgccgaataccgacaccgactacttggtcagcccggtgaaagctgaagacggcagctttttcgacagccgcgaggagtttaagaaaggtggcgatgcccgcctgccgatagactgcgatgctaatggtgcgtaccatattgccctgaaaggcttgtacttgttgttgaatgatttcaaccgtgataacaagggcgtcatccaaaacatctctaacaaggactggtttaaattcgtgcaggagaaagtttacaaagactaa

SEQ ID NO: 826 - DNA, 3882 bp, synthetic construct
  source 1..3882: mol_type = other DNA
atggctaggataattgatgaattttgtggacagatgaatggatacagccgttccatcacgctgcgtaaccgcctggtgccgatcggcaagaccgaggaaaatctgaaacagtttctggagaaggacttagagcgcgcaactgcgtacccggacatcaaaaacctgattgacgctatccatcgtaatgtcattgaggacaccttaagcaaagtggccctgaactggaacgaaatctttaatatcctcgcgacgtaccagaacgaaaaagataaaaagaaaaaggcggcgatcaaaaaggacctggagaagctccaaagcggtgcacgtaaaaagattgttgaggcattcaaaaagaacccggattttgaaaaactgttcaaagagggtctgtttaaagagttgctgcctgaactgatcaaaagcgcaccggttgatgaaatcgcggttaaaaccaaggcgctggaatgcttcaaccgttttagcacctatttcacgggtttccacgacaatcgcaaaaacatgtactcggaagaagctaaatctaccgcaattagctatcgcatcgtgaacgaaaatttcccgaaattttttgccaatatcaagttgttcaactatctgaaagagcactttccgcgaatcatcattgataccgaagagtccctgaaagactatttgaagggcaaaaagctggattctgtatttagcattgacggctttaacagcgtgctggcgcagagcgggattgatttctataacaccgtgataggcggtatttcaggtgaggccggcaccaaaaaaacgcagggtcttaacgagaagattaacttagcgcgccagcaattatccaaggaggagaagaacaagctgcgcggtaaaatggtggtgctgtttaaacagatcttgtctgatcgtgaaaccagcagctttatcccagtgggttttgccaacaaggaggaggtgtactctacggtgaaagaattcaacaactcgattgccgaaaaggcggtgtccaaggtgcgtgatctattcctgcaccgcgaagaattcacgctaaacgagattttcgtcccggcaaagagcttgaccgacttcagtcaggccatcttcggatcctggtctattttgagtgagggcctgttcctgctggagaaggacagcatgaaaaaggctctaagcgaatcccaagaagaaaagatcaataaggagattgcgaaaaaagactgctcctttaccgaactacaactggcgtacgagcgctactgcaccgagcacaacttgccggttgaaaaattctgcaaagactacttcgacatcgtcgattacaggggaaacggtgcgaaaagcgaaaaaacaaaagtgagcatcctgagcgaaatcctggaaacctttttacaattggactttgaccacattcaggacctgcaacaagaaaagaacgctgcgattcctatcaaagcatatcttgacgaagttcagaatttgtaccaccacctgaagttggtcgattatcgtggcgaagagcagaaagactcaaccttttatagcaaacacgatgaaatcctgaccgatctttctcagatcgtcccattgtataataaagtccgtaactttgttaccaaaaaactgggtgagagcaaaaagatcaagctgaacttcgattgcccgactctggctaatggctgggatgagaatcaagagtccagcaacgatgcaattatcctgagaaaggacggcaaatactatctgggcatttacaacccgaacaacaaaccgaaattcgcgaagaaggacagcatcgtgggtgattgctatgaaaaaatggcatacaagcaaatcgcactgccgatgggtttgggtgcatttgtgcgcaaatgctttggcaccgctcagaaatacggttggggttgcccggagaattgcctgaacagcgagggtaaaattatcatcaaagacgaggaggcgaagggtaatctggaggcaatcatcgactgttacaaagattttctgaacaagtacgaaaaggacggcttcaagtacaaggactacaatttttccttcctggactctgccagctatgaaaaactgtctgatttcttcaacgacgttaaaccgcagggctataagctgagctttacgtccatcccactgtcagagatcgatatgatgattgatgaaggtaaactgtttttgtttcagatatataacaaagacttcgcgaagaaggcgacggggaagaagaacctgcataccctttattgggaaaacctattctcagtcgagaatctgcaagatgtggtgttgaagctcaatggcgaagccgagctgttctggcgtgaggctagcatcaaaaaggacaaggtgatcgttcacaaaaaaggttctattctggtgaatcgtaccaccacggatggtaagagcatcccggaggccatttatcaagaaatctatcaattaaaaaacaaaatggcggattccatcagcgacgaagcgaaacgccttctagagtccggcaccgttgtctgtaaagtcgccactcatgatatcgttaaggataaacattttactgaaaacacgtatctgttccattgtccgattaccatgaacttcaaggcaaaagaccgtaccaataaggaatttaacaatcatgttctggaggttcttaacaagaatccggatattaaggtgatcggcttagaccgtggcgaacgtcatctgctgtacctgagcctgatcaatcagaagggtgaaattgagtgccagaaaacgctgaacctagttgagcaagttcgtaatgataagaccgtttccgttaattatcatgaaaaactggtgcacaaagaaggcagccgtgatgctgcgagaaaaaactggcagaccattggcaatattaaagagctgaaggagggctacctgtcggcggtggtgcacgagattgcgagtctgatggtaaagcacaatgcgatcgttgtaatggaagacctgaatttcggctttaagcgcggtcgttttgctgtggagcgtcagatctaccaaaagttcgaaaacatgctgattgagaagctgaactatctggtttttaaagaccgtaaagtgacggagccgggtggcgttctgaacgcgtaccagttggcgaacaagagcgcgaaggtgacagatgtttataaacaatgcggttggctgttctatatcccggcagcgtacaccagcaaaattgatccgcgtaccggtttcgcgaatctgttcattaccaagggtctgaccaatgttgagaagaagaaggagtttttcggcaagttcgactcgattcgttatgatgcgaccgagtcttgtttcgttttttccttcgactacgcaaagatttgtgacaatgctgattacaagaagaaatgggatgtttacacccgtggtactcgtctcgtttacaacaagaccgaacgcaagaacgtgagcgtcaacccaaccgaagagttgcagtgtgtttttgatgagttcggcatcaagtggaataccggcgaagacctgattgaatctattagcctgatcccggcggaaaagtccaacgcgaagttcttcgacgttttgttgcgtatgtttaacgcgactcttcagatgagaaacagcgtgccgaataccgacaccgactacttggtcagcccggtgaaagctgaagacggcagctttttcgacagccgcgaggagtttaagaaaggtggcgatgcccgcctgccgatagactgcgatgctaatggtgcgtaccatattgccctgaaaggcttgtacttgttgttgaatgatttcaaccgtgataacaagggcgtcatccaaaacatctctaacaaggactggtttaaattcgtgcaggagaaagtttacaaagactaa

SEQ ID NO: 827 - DNA, 3882 bp, synthetic construct
  source 1..3882: mol_type = other DNA
atggctaggataattgatgaattttgtggacagatgaatggatacagccgttccatcacgctgcgtaaccgcctggtgccgatcggcaagaccgaggaaaatctgaaacagtttctggagaaggacttagagcgcgcaactgcgtacccggacatcaaaaacctgattgacgctatccatcgtaatgtcattgaggacaccttaagcaaagtggccctgaactggaacgaaatctttaatatcctcgcgacgtaccagaacgaaaaagataaaaagaaaaaggcggcgatcaaaaaggacctggagaagctccaaagcggtgcacgtaaaaagattgttgaggcattcaaaaagaacccggattttgaaaaactgttcaaagagggtctgtttaaagagttgctgcctgaactgatcaaaagcgcaccggttgatgaaatcgcggttaaaaccaaggcgctggaatgcttcaaccgttttagcacctatttcacgggtttccacgacaatcgcaaaaacatgtactcggaagaagctaaatctaccgcaattagctatcgcatcgtgaacgaaaatttcccgaaattttttgccaatatcaagttgttcaactatctgaaagagcactttccgcgaatcatcattgataccgaagagtccctgaaagactatttgaagggcaaaaagctggattctgtatttagcattgacggctttaacagcgtgctggcgcagagcgggattgatttctataacaccgtgataggcggtatttcaggtgaggccggcaccaaaaaaacgcagggtcttaacgagaagattaacttagcgcgccagcaattatccaaggaggagaagaacaagctgcgcggtaaaatggtggtgctgtttaaacagatcttgtctgatcgtgaaaccagcagctttatcccagtgggttttgccaacaaggaggaggtgtactctacggtgaaagaattcaacaactcgattgccgaaaaggcggtgtccaaggtgcgtgatctattcctgcaccgcgaagaattcacgctaaacgagattttcgtcccggcaaagagcttgaccgacttcagtcaggccatcttcggatcctggtctattttgagtgagggcctgttcctgctggagaaggacagcatgaaaaaggctctaagcgaatcccaagaagaaaagatcaataaggagattgcgaaaaaagactgctcctttaccgaactacaactggcgtacgagcgctactgcaccgagcacaacttgccggttgaaaaattctgcaaagactacttcgacatcgtcgattacaggggaaacggtgcgaaaagcgaaaaaacaaaagtgagcatcctgagcgaaatcctggaaacctttttacaattggactttgaccacattcaggacctgcaacaagaaaagaacgctgcgattcctatcaaagcatatcttgacgaagttcagaatttgtaccaccacctgaagttggtcgattatcgtggcgaagagcagaaagactcaaccttttatagcaaacacgatgaaatcctgaccgatctttctcagatcgtcccattgtataataaagtccgtaactttgttaccaaaaaactgggtgagagcaaaaagatcaagctgaacttcgattgcccgactctggctaatggctgggatgagaatcaagagtccagcaacgatgcaattatcctgagaaaggacggcaaatactatctgggcatttacaacccgaacaacaaaccgaaattcgcgaagaaggacagcatcgtgggtgattgctatgaaaaaatggcatacaagcaaatcgcactgccgatgggtttgggtgcatttgtgcgcaaatgctttggcaccgctcagaaatacggttggggttgcccggagaattgcctgaacagcgagggtaaaattatcatcaaagacgaggaggcgaagggtaatctggaggcaatcatcgactgttacaaagattttctgaacaagtacgaaaaggacggcttcaagtacaaggactacaatttttccttcctggactctgccagctatgaaaaactgtctgatttcttcaacgacgttaaaccgcagggctataagctgagctttacgtccatcccactgtcagagatcgataagatgattgatgaaggtaaactgtttttgtttcagatatataacaaagacttcgcgaagaaggcgacggggaagaagaacctgcataccctttattgggaaaacctattctcagtcgagaatctgcaagatgtggtgttgaagctcaatggcgaagccgagctgttctggcgtgaggctagcatcaaaaaggacaaggtgatcgttcacaaaaaaggttctattctggtgaatcgtaccaccacggatggtaagagcatcccggaggtcatttatcaagaaatctatcaattaaaaaacaaaatggcggattccatcagcgacgaagcgaaacgccttctagagtccggcaccgttgtctgtaaagtcgccactcatgatatcgttaaggataaacattttactgaaaacacgtatctgttccattgtccgattaccatgaacttcaaggcaaaagaccgtaccaataaggaatttaacaatcatgttctggaggttcttaacaagaatccggatattaaggtgatcggcttagaccgtggcgaacgtcatctgctgtacctgagcctgatcaatcagaagggtgaaattgagtgccagaaaacgctgaacctagttgagcaagttcgtaatgataagaccgtttccgttaattatcatgaaaaactggtgcacaaagaaggcagccgtgatgctgcgagaaaaaactggcagaccattggcaatattaaagagctgaaggagggctacctgtcggcggtggtgcacgagattgcgagtctgatggtaaagcacaatgcgatcgttgtaatggaagacctgaatttcggctttaagcgcggtcgttttgctgtggagcgtcagatctaccaaaagttcgaaaacatgctgattgagaagctgaactatctggtttttaaagaccgtaaagtgacggagccgggtggcgttctgaacgcgtaccagttggcgaacaagagcgcgaaggtgacagatgtttataaacaatgcggttggctgttctatatcccggcagcgtacaccagcaaaattgatccgcgtaccggtttcgcgaatctgttcattaccaagggtctgaccaatgttgagaagaagaaggagtttttcggcaagttcgactcgattcgttatgatgcgaccgagtcttgtttcgttttttccttcgactacgcaaagatttgtgacaatgctgattacaagaagaaatgggatgtttacacccgtggtactcgtctcgtttacaacaagaccgaacgcaagaacgtgagcgtcaacccaaccgaagagttgcagtgtgtttttgatgagttcggcatcaagtggaataccggcgaagacctgattgaatctattagcctgatcccggcggaaaagtccaacgcgaagttcttcgacgttttgttgcgtatgtttaacgcgactcttcagatgagaaacagcgtgccgaataccgacaccgactacttggtcagcccggtgaaagctgaagacggcagctttttcgacagccgcgaggagtttaagaaaggtggcgatgcccgcctgccgatagactgcgatgctaatggtgcgtaccatattgccctgaaaggcttgtacttgttgttgaatgatttcaaccgtgataacaagggcgtcatccaaaacatctctaacaaggactggtttaaattcgtgcaggagaaagtttacaaagactaa

SEQ ID NO: 828 - DNA, 3882 bp, synthetic construct
  source 1..3882: mol_type = other DNA
atggctaggataattgatgaattttgtggacagatgaatggatacagccgttccatcacgctgcgtaaccgcctggtgccgatcggcaagaccgaggaaaatctgaaacagtttctggagaaggacttagagcgcgcaactgcgtacccggacatcaaaaacctgattgacgctatccatcgtaatgtcattgaggacaccttaagcaaagtggccctgaactggaacgaaatctttaatatcctcgcgacgtaccagaacgaaaaagataaaaagaaaaaggcggcgatcaaaaaggacctggagaagctccaaagcggtgcacgtaaaaagattgttgaggcattcaaaaagaacccggattttgaaaaactgttcaaagagggtctgtttaaagagttgctgcctgaactgatcaaaagcgcaccggttgatgaaatcgcggttaaaaccaaggcgctggaatgcttcaaccgttttagcacctatttcacgggtttccacgacaatcgcaaaaacatgtactcggaagaagctaaatctaccgcaattagctatcgcatcgtgaacgaaaatttcccgaaattttttgccaatatcaagttgttcaactatctgaaagagcactttccgcgaatcatcattgataccgaagagtccctgaaagactatttgaagggcaaaaagctggattctgtatttagcattgacggctttaacagcgtgctggcgcagagcgggattgatttctataacaccgtgataggcggtatttcaggtgaggccggcaccaaaaaaacgcagggtcttaacgagaagattaacttagcgcgccagcaattatccaaggaggagaagaacaagctgcgcggtaaaatggtggtgctgtttaaacagatcttgtctgatcgtgaaaccagcagctttatcccagtgggttttgccaacaaggaggaggtgtactctacggtgaaagaattcaacaactcgattgccgaaaaggcggtgtccaaggtgcgtgatctattcctgcaccgcgaagaattcacgctaaacgagattttcgtcccggcaaagagcttgaccgacttcagtcaggccatcttcggatcctggtctattttgagtgagggcctgttcctgctggagaaggacagcatgaaaaaggctctaagcgaatcccaagaagaaaagatcaataaggagattgcgaaaaaagactgctcctttaccgaactacaactggcgtacgagcgctactgcaccgagcacaacttgccggttgaaaaattctgcaaagactacttcgacatcgtcgattacaggggaaacggtgcgaaaagcgaaaaaacaaaagtgagcatcctgagcgaaatcctggaaacctttttacaattggactttgaccacattcaggacctgcaacaagaaaagaacgctgcgattcctatcaaagcatatcttgacgaagttcagaatttgtaccaccacctgaagttggtcgattatcgtggcgaagagcagaaagactcaaccttttatagcaaacacgatgaaatcctgaccgatctttctcagatcgtcccattgtataataaagtccgtaactttgttaccaaaaaactgggtgagagcaaaaagatcaagctgaacttcgattgcccgactctggctaatggctgggatgagaatcaagagtccagcaacgatgcaattatcctgagaaaggacggcaaatactatctgggcatttacaacccgaacaacaaaccgaaattcgcgaagaaggacagcatcgtgggtgattgctatgaaaaaatggcatacaagcaaatcgcactgccgatgggtttgggtgcatttgtgcgcaaatgctttggcaccgctcagaaatacggttggggttgcccggagaattgcctgaacagcgagggtaaaattatcatcaaagacgaggaggcgaagggtaatctggaggcaatcatcgactgttacaaagattttctgaacaagtacgaaaaggacggcttcaagtacaaggactacaatttttccttcctggactctgccagctatgaaaaactgtctgatttcttcaacgacgttaaaccgcagggctataagctgagctttacgtccatcccactgtcagagatcgataagatgattgatgaaggtaaactgtttttgtttcagatatataacaaagacttcgcgaagaaggcgacggggaagaagaacctgcataccctttattgggaaaacctattctcagtcgagaatctgcaagatgtggtgttgatgctcaatggcgaagccgagctgttctggcgtgaggctagcatcaaaaaggacaaggtgatcgttcacaaaaaaggttctattctggtgaatcgtaccaccacggatggtaagagcatcccggaggccatttatcaagaaatctatcaattaaaaaacaaaatggcggattccatcagcgacgaagcgaaacgccttctagagtccggcaccgttgtctgtaaagtcgccactcatgatatcgttaaggataaacattttactgaaaacacgtatctgttccattgtccgattaccatgaacttcaaggcaaaagaccgtaccaataaggaatttaacaatcatgttctggaggttcttaacaagaatccggatattaaggtgatcggcttagaccgtggcgaacgtcatctgctgtacctgagcctgatcaatcagaagggtgaaattgagtgccagaaaacgctgaacctagttgagcaagttcgtaatgataagaccgtttccgttaattatcatgaaaaactggtgcacaaagaaggcagccgtgatgctgcgagaaaaaactggcagaccattggcaatattaaagagctgaaggagggctacctgtcggcggtggtgcacgagattgcgagtctgatggtaaagcacaatgcgatcgttgtaatggaagacctgaatttcggctttaagcgcggtcgttttgctgtggagcgtcagatctaccaaaagttcgaaaacatgctgattgagaagctgaactatctggtttttaaagaccgtaaagtgacggagccgggtggcgttctgaacgcgtaccagttggcgaacaagagcgcgaaggtgacagatgtttataaacaatgcggttggctgttctatatcccggcagcgtacaccagcaaaattgatccgcgtaccggtttcgcgaatctgttcattaccaagggtctgaccaatgttgagaagaagaaggagtttttcggcaagttcgactcgattcgttatgatgcgaccgagtcttgtttcgttttttccttcgactacgcaaagatttgtgacaatgctgattacaagaagaaatgggatgtttacacccgtggtactcgtctcgtttacaacaagaccgaacgcaagaacgtgagcgtcaacccaaccgaagagttgcagtgtgtttttgatgagttcggcatcaagtggaataccggcgaagacctgattgaatctattagcctgatcccggcggaaaagtccaacgcgaagttcttcgacgttttgttgcgtatgtttaacgcgactcttcagatgagaaacagcgtgccgaataccgacaccgactacttggtcagcccggtgaaagctgaagacggcagctttttcgacagccgcgaggagtttaagaaaggtggcgatgcccgcctgccgatagactgcgatgctaatggtgcgtaccatattgccctgaaaggcttgtacttgttgttgaatgatttcaaccgtgataacaagggcgtcatccaaaacatctctaacaaggactggtttaaattcgtgcaggagaaagtttacaaagactaa

SEQ ID NO: 829 - DNA, 3882 bp, synthetic construct
  source 1..3882: mol_type = other DNA
atggctaggataattgatgaattttgtggacagatgaatggatacagccgttccatcacgctgcgtaaccgcctggtgccgatcggcaagaccgaggaaaatctgaaacagtttctggagaaggacttagagcgcgcaactgcgtacccggacatcaaaaacctgattgacgctatccatcgtaatgtcattgaggacaccttaagcaaagtggccctgaactggaacgaaatctttaatatcctcgcgacgtaccagaacgaaaaagataaaaagaaaaaggcggcgatcaaaaaggacctggagaagctccaaagcggtgcacgtaaaaagattgttgaggcattcaaaaagaacccggattttgaaaaactgttcaaagagggtctgtttaaagagttgctgcctgaactgatcaaaagcgcaccggttgatgaaatcgcggttaaaaccaaggcgctggaatgcttcaaccgttttagcacctatttcacgggtttccacgacaatcgcaaaaacatgtactcggaagaagctaaatctaccgcaattagctatcgcatcgtgaacgaaaatttcccgaaattttttgccaatatcaagttgttcaactatctgaaagagcactttccgcgaatcatcattgataccgaagagtccctgaaagactatttgaagggcaaaaagctggattctgtatttagcattgacggctttaacagcgtgctggcgcagagcgggattgatttctataacaccgtgataggcggtatttcaggtgaggccggcaccaaaaaaacgcagggtcttaacgagaagattaacttagcgcgccagcaattatccaaggaggagaagaacaagctgcgcggtaaaatggtggtgctgtttaaacagatcttgtctgatcgtgaaaccagcagctttatcccagtgggttttgccaacaaggaggaggtgtactctacggtgaaagaattcaacaactcgattgccgaaaaggcggtgtccaaggtgcgtgatctattcctgcaccgcgaagaattcacgctaaacgagattttcgtcccggcaaagagcttgaccgacttcagtcaggccatcttcggatcctggtctattttgagtgagggcctgttcctgctggagaaggacagcatgaaaaaggctctaagcgaatcccaagaagaaaagatcaataaggagattgcgaaaaaagactgctcctttaccgaactacaactggcgtacgagcgctactgcaccgagcacaacttgccggttgaaaaattctgcaaagactacttcgacatcgtcgattacaggggaaacggtgcgaaaagcgaaaaaacaaaagtgagcatcctgagcgaaatcctggaaacctttttacaattggactttgaccacattcaggacctgcaacaagaaaagaacgctgcgattcctatcaaagcatatcttgacgaagttcagaatttgtaccaccacctgaagttggtcgattatcgtggcgaagagcagaaagactcaaccttttatagcaaacacgatgaaatcctgaccgatctttctcagatcgtcccattgtataataaagtccgtaactttgttaccaaaaaactgggtgagagcaaaaagatcaagctgaacttcgattgcccgactctggctaatggctgggatgagaatcaagagtccagcaacgatgcaattatcctgagaaaggacggcaaatactatctgggcatttacaacccgaacaacaaaccgaaattcgcgaagaaggacagcatcgtgggtgattgctatgaaaaaatggcatacaagcaaatcgcactgccgatgggtttgggtgcatttgtgcgcaaatgctttggcaccgctcagaaatacggttggggttgcccggagaattgcctgaacagcgagggtaaaattatcatcaaagacgaggaggcgaagggtaatctggaggcaatcatcgactgttacaaagattttctgaacaagtacgaaaaggacggcttcaagtacaaggactacaatttttccttcctggactctgccagctatgaaaaactgtctgatttcttcaacgacgttaaaccgcagggctataagctgagctttacgtccatcccactgtcagagatcgataagatgattgatgaaggtaaactgtttttgtttcagatatataacaaagacttcgcgaagaaggcgacggggaagaagaacctgcataccctttattgggaaaacctattctcagtcgagaatctgcaagatgtggtgttgaagctcaatggcgaagccgagctgttctggcgtgaggctagaatcaaaaaggacaaggtgatcgttcacaaaaaaggttctattctggtgaatcgtaccaccacggatggtaagagcatcccggaggccatttatcaagaaatctatcaattaaaaaacaaaatggcggattccatcagcgacgaagcgaaacgccttctagagtccggcaccgttgtctgtaaagtcgccactcatgatatcgttaaggataaacattttactgaaaacacgtatctgttccattgtccgattaccatgaacttcaaggcaaaagaccgtaccaataaggaatttaacaatcatgttctggaggttcttaacaagaatccggatattaaggtgatcggcttagaccgtggcgaacgtcatctgctgtacctgagcctgatcaatcagaagggtgaaattgagtgccagaaaacgctgaacctagttgagcaagttcgtaatgataagaccgtttccgttaattatcatgaaaaactggtgcacaaagaaggcagccgtgatgctgcgagaaaaaactggcagaccattggcaatattaaagagctgaaggagggctacctgtcggcggtggtgcacgagattgcgagtctgatggtaaagcacaatgcgatcgttgtaatggaagacctgaatttcggctttaagcgcggtcgttttgctgtggagcgtcagatctaccaaaagttcgaaaacatgctgattgagaagctgaactatctggtttttaaagaccgtaaagtgacggagccgggtggcgttctgaacgcgtaccagttggcgaacaagagcgcgaaggtgacagatgtttataaacaatgcggttggctgttctatatcccggcagcgtacaccagcaaaattgatccgcgtaccggtttcgcgaatctgttcattaccaagggtctgaccaatgttgagaagaagaaggagtttttcggcaagttcgactcgattcgttatgatgcgaccgagtcttgtttcgttttttccttcgactacgcaaagatttgtgacaatgctgattacaagaagaaatgggatgtttacacccgtggtactcgtctcgtttacaacaagaccgaacgcaagaacgtgagcgtcaacccaaccgaagagttgcagtgtgtttttgatgagttcggcatcaagtggaataccggcgaagacctgattgaatctattagcctgatcccggcggaaaagtccaacgcgaagttcttcgacgttttgttgcgtatgtttaacgcgactcttcagatgagaaacagcgtgccgaataccgacaccgactacttggtcagcccggtgaaagctgaagacggcagctttttcgacagccgcgaggagtttaagaaaggtggcgatgcccgcctgccgatagactgcgatgctaatggtgcgtaccatattgccctgaaaggcttgtacttgttgttgaatgatttcaaccgtgataacaagggcgtcatccaaaacatctctaacaaggactggtttaaattcgtgcaggagaaagtttacaaagactaa

SEQ ID NO: 830 - DNA, 3882 bp, synthetic construct
  source 1..3882: mol_type = other DNA
atggctaggataattgatgaattttgtggacagatgaatggatacagccgttccatcacgctgcgtaaccgcctggtgccgatcggcaagaccgaggaaaatctgaaacagtttctggagaaggacttagagcgcgcaactgcgtacccggacatcaaaaacctgattgacgctatccatcgtaatgtcattgaggacaccttaagcaaagtggccctgaactggaacgaaatctttaatatcctcgcgacgtaccagaacgaaaaagataaaaagaaaaaggcggcgatcaaaaaggacctggagaagctccaaagcggtgcacgtaaaaagattgttgaggcattcaaaaagaacccggattttgaaaaactgttcaaagagggtctgtttaaagagttgctgcctgaactgatcaaaagcgcaccggttgatgaaatcgcggttaaaaccaaggcgctggaatgcttcaaccgttttagcacctatttcacgggtttccacgacaatcgcaaaaacatgtactcggaagaagctaaatctaccgcaattagctatcgcatcgtgaacgaaaatttcccgaaattttttgccaatatcaagttgttcaactatctgaaagagcactttccgcgaatcatcattgataccgaagagtccctgaaagactatttgaagggcaaaaagctggattctgtatttagcattgacggctttaacagcgtgctggcgcagagcgggattgatttctataacaccgtgataggcggtatttcaggtgaggccggcaccaaaaaaacgcagggtcttaacgagaagattaacttagcgcgccagcaattatccaaggaggagaagaacaagctgcgcggtaaaatggtggtgctgtttaaacagatcttgtctgatcgtgaaaccagcagctttatcccagtgggttttgccaacaaggaggaggtgtactctacggtgaaagaattcaacaactcgattgccgaaaaggcggtgtccaaggtgcgtgatctattcctgcaccgcgaagaattcacgctaaacgagattttcgtcccggcaaagagcttgaccgacttcagtcaggccatcttcggatcctggtctattttgagtgagggcctgttcctgctggagaaggacagcatgaaaaaggctctaagcgaatcccaagaagaaaagatcaataaggagattgcgaaaaaagactgctcctttaccgaactacaactggcgtacgagcgctactgcaccgagcacaacttgccggttgaaaaattctgcaaagactacttcgacatcgtcgattacaggggaaacggtgcgaaaagcgaaaaaacaaaagtgagcatcctgagcgaaatcctggaaacctttttacaattggactttgaccacattcaggacctgcaacaagaaaagaacgctgcgattcctatcaaagcatatcttgacgaagttcagaatttgtaccaccacctgaagttggtcgattatcgtggcgaagagcagaaagactcaaccttttatagcaaacacgatgaaatcctgaccgatctttctcagatcgtcccattgtataataaagtccgtaactttgttaccaaaaaactgggtgagagcaaaaagatcaagctgaacttcgattgcccgactctggctaatggctgggatgagaatcaagagtccagcaacgatgcaattatcctgagaaaggacggcaaatactatctgggcatttacaacccgaacaacaaaccgaaattcgcgaagaaggacagcatcgtgggtgattgctatgaaaaaatggcatacaagcaaatcgcactgccgatgggtttgggtgcatttgtgcgcaaatgctttggcaccgctcagaaatacggttggggttgcccggagaattgcctgaacagcgagggtaaaattatcatcaaagacgaggaggcgaagggtaatctggaggcaatcatcgactgttacaaagattttctgaacaagtacgaaaaggacggcttcaagtacaaggactacaatttttccttcctggactctgccagctatgaaaaactgtctgatttcttcaacgacgttaaaccgcagggctataagctgagctttacgtccatcccactgtcagagatcgataagatgattgatgatggtaaactgtttttgtttcagatatataacaaagacttcgcgaagaaggcgacggggaagaagaacctgcataccctttattgggaaaacctattctcagtcgagaatctgcaagatgtggtgttgaagctcaatggcgaagccgagctgttctggcgtgaggctagcatcaaaaaggacaaggtgatcgttcacaaaaaaggttctattctggtgaatcgtaccaccacggatggtaagagcatcccggaggccatttatcaagaaatctatcaattaaaaaacaaaatggcggattccatcagcgacgaagcgaaacgccttctagagtccggcaccgttgtctgtaaagtcgccactcatgatatcgttaaggataaacattttactgaaaacacgtatctgttccattgtccgattaccatgaacttcaaggcaaaagaccgtaccaataaggaatttaacaatcatgttctggaggttcttaacaagaatccggatattaaggtgatcggcttagaccgtggcgaacgtcatctgctgtacctgagcctgatcaatcagaagggtgaaattgagtgccagaaaacgctgaacctagttgagcaagttcgtaatgataagaccgtttccgttaattatcatgaaaaactggtgcacaaagaaggcagccgtgatgctgcgagaaaaaactggcagaccattggcaatattaaagagctgaaggagggctacctgtcggcggtggtgcacgagattgcgagtctgatggtaaagcacaatgcgatcgttgtaatggaagacctgaatttcggctttaagcgcggtcgttttgctgtggagcgtcagatctaccaaaagttcgaaaacatgctgattgagaagctgaactatctggtttttaaagaccgtaaagtgacggagccgggtggcgttctgaacgcgtaccagttggcgaacaagagcgcgaaggtgacagatgtttataaacaatgcggttggctgttctatatcccggcagcgtacaccagcaaaattgatccgcgtaccggtttcgcgaatctgttcattaccaagggtctgaccaatgttgagaagaagaaggagtttttcggcaagttcgactcgattcgttatgatgcgaccgagtcttgtttcgttttttccttcgactacgcaaagatttgtgacaatgctgattacaagaagaaatgggatgtttacacccgtggtactcgtctcgtttacaacaagaccgaacgcaagaacgtgagcgtcaacccaaccgaagagttgcagtgtgtttttgatgagttcggcatcaagtggaataccggcgaagacctgattgaatctattagcctgatcccggcggaaaagtccaacgcgaagttcttcgacgttttgttgcgtatgtttaacgcgactcttcagatgagaaacagcgtgccgaataccgacaccgactacttggtcagcccggtgaaagctgaagacggcagctttttcgacagccgcgaggagtttaagaaaggtggcgatgcccgcctgccgatagactgcgatgctaatggtgcgtaccatattgccctgaaaggcttgtacttgttgttgaatgatttcaaccgtgataacaagggcgtcatccaaaacatctctaacaaggactggtttaaattcgtgcaggagaaagtttacaaagactaa

SEQ ID NO: 831 - DNA, 3882 bp, synthetic construct
  source 1..3882: mol_type = other DNA
atggctaggataattgatgaattttgtggacagatgaatggatacagccgttccatcacgctgcgtaaccgcctggtgccgatcggcaagaccgaggaaaatctgaaacagtttctggagaaggacttagagcgcgcaactgcgtacccggacatcaaaaacctgattgacgctatccatcgtaatgtcattgaggacaccttaagcaaagtggccctgaactggaacgaaatctttaatatcctcgcgacgtaccagaacgaaaaagataaaaagaaaaaggcggcgatcaaaaaggacctggagaagctccaaagcggtgcacgtaaaaagattgttgaggcattcaaaaagaacccggattttgaaaaactgttcaaagagggtctgtttaaagagttgctgcctgaactgatcaaaagcgcaccggttgatgaaatcgcggttaaaaccaaggcgctggaatgcttcaaccgttttagcacctatttcacgggtttccacgacaatcgcaaaaacatgtactcggaagaagctaaatctaccgcaattagctatcgcatcgtgaacgaaaatttcccgaaattttttgccaatatcaagttgttcaactatctgaaagagcactttccgcgaatcatcattgataccgaagagtccctgaaagactatttgaagggcaaaaagctggattctgtatttagcattgacggctttaacagcgtgctggcgcagagcgggattgatttctataacaccgtgataggcggtatttcaggtgaggccggcaccaaaaaaacgcagggtcttaacgagaagattaacttagcgcgccagcaattatccaaggaggagaagaacaagctgcgcggtaaaatggtggtgctgtttaaacagatcttgtctgatcgtgaaaccagcagctttatcccagtgggttttgccaacaaggaggaggtgtactctacggtgaaagaattcaacaactcgattgccgaaaaggcggtgtccaaggtgcgtgatctattcctgcaccgcgaagaattcacgctaaacgagattttcgtcccggcaaagagcttgaccgacttcagtcaggccatcttcggatcctggtctattttgagtgagggcctgttcctgctggagaaggacagcatgaaaaaggctctaagcgaatcccaagaagaaaagatcaataaggagattgcgaaaaaagactgctcctttaccgaactacaactggcgtacgagcgctactgcaccgagcacaacttgccggttgaaaaattctgcaaagactacttcgacatcgtcgattacaggggaaacggtgcgaaaagcgaaaaaacaaaagtgagcatcctgagcgaaatcctggaaacctttttacaattggactttgaccacattcaggacctgcaacaagaaaagaacgctgcgattcctatcaaagcatatcttgacgaagttcagaatttgtaccaccacctgaagttggtcgattatcgtggcgaagagcagaaagactcaaccttttatagcaaacacgatgaaatcctgaccgatctttctcagatcgtcccattgtataataaagtccgtaactttgttaccaaaaaactgggtgagagcaaaaagatcaagctgaacttcgattgcccgactctggctaatggctgggatgagaatcaagagtccagcaacgatgcaattatcctgagaaaggacggcaaatactatctgggcatttacaacccgaacaacaaaccgaaattcgcgaagaaggacagcatcgtgggtgattgctatgaaaaaatggcatacaagcaaatcgcactgccgatgggtttgggtgcatttgtgcgcaaatgctttggcaccgctcagaaatacggttggggttgcccggagaattgcctgaacagcgagggtaaaattatcatcaaagacgaggaggcgaagggtaatctggaggcaatcatcgactgttacaaagattttctgaacaagtacgaaaaggacggcttcaagtacaaggactacaatttttccttcctggactctgccagctatgaaaaactgtctgatttcttcaacgacgttaaaccgcagggctataagctgagctttacgtccatcccactgtcagagatcgataagatgattgatgaaggtaaactgttttcgtttcagatatataacaaagacttcgcgaagaaggcgacggggaagaagaacctgcataccctttattgggaaaacctattctcagtcgagaatctgcaagatgtggtgttgaagctcaatggcgaagccgagctgttctggcgtgaggctagcatcaaaaaggacaaggtgatcgttcacaaaaaaggttctattctggtgaatcgtaccaccacggatggtaagagcatcccggaggccatttatcaagaaatctatcaattaaaaaacaaaatggcggattccatcagcgacgaagcgaaacgccttctagagtccggcaccgttgtctgtaaagtcgccactcatgatatcgttaaggataaacattttactgaaaacacgtatctgttccattgtccgattaccatgaacttcaaggcaaaagaccgtaccaataaggaatttaacaatcatgttctggaggttcttaacaagaatccggatattaaggtgatcggcttagaccgtggcgaacgtcatctgctgtacctgagcctgatcaatcagaagggtgaaattgagtgccagaaaacgctgaacctagttgagcaagttcgtaatgataagaccgtttccgttaattatcatgaaaaactggtgcacaaagaaggcagccgtgatgctgcgagaaaaaactggcagaccattggcaatattaaagagctgaaggagggctacctgtcggcggtggtgcacgagattgcgagtctgatggtaaagcacaatgcgatcgttgtaatggaagacctgaatttcggctttaagcgcggtcgttttgctgtggagcgtcagatctaccaaaagttcgaaaacatgctgattgagaagctgaactatctggtttttaaagaccgtaaagtgacggagccgggtggcgttctgaacgcgtaccagttggcgaacaagagcgcgaaggtgacagatgtttataaacaatgcggttggctgttctatatcccggcagcgtacaccagcaaaattgatccgcgtaccggtttcgcgaatctgttcattaccaagggtctgaccaatgttgagaagaagaaggagtttttcggcaagttcgactcgattcgttatgatgcgaccgagtcttgtttcgttttttccttcgactacgcaaagatttgtgacaatgctgattacaagaagaaatgggatgtttacacccgtggtactcgtctcgtttacaacaagaccgaacgcaagaacgtgagcgtcaacccaaccgaagagttgcagtgtgtttttgatgagttcggcatcaagtggaataccggcgaagacctgattgaatctattagcctgatcccggcggaaaagtccaacgcgaagttcttcgacgttttgttgcgtatgtttaacgcgactcttcagatgagaaacagcgtgccgaataccgacaccgactacttggtcagcccggtgaaagctgaagacggcagctttttcgacagccgcgaggagtttaagaaaggtggcgatgcccgcctgccgatagactgcgatgctaatggtgcgtaccatattgccctgaaaggcttgtacttgttgttgaatgatttcaaccgtgataacaagggcgtcatccaaaacatctctaacaaggactggtttaaattcgtgcaggagaaagtttacaaagactaa

SEQ ID NO: 832 - protein, 7 aa, synthetic construct
PKKKRKV

SEQ ID NO: 833 - protein, 4 aa, synthetic construct
LTLD

SEQ ID NO: 834 - protein, 4 aa, synthetic construct
LTLA

SEQ ID NO: 835 - protein, 4 aa, synthetic construct
LTQV

SEQ ID NO: 836 - protein, 4 aa, synthetic construct
EQHG

SEQ ID NO: 837 - protein, 4 aa, synthetic construct
RDHG

SEQ ID NO: 838 - protein, 4 aa, synthetic construct
LTPD

SEQ ID NO: 839 - protein, 5 aa, synthetic construct
NQALE

SEQ ID NO: 840 - protein, 5 aa, synthetic construct
KRALE

SEQ ID NO: 841 - protein, 4 aa, synthetic construct
LTPE

SEQ ID NO: 842 - protein, 7 aa, synthetic construct
NGKQALE

SEQ ID NO: 843 - protein, 6 aa, synthetic construct
HHHHHH

SEQ ID NO: 844 - protein, 8 aa, synthetic construct
VSRKRPRP

SEQ ID NO: 845 - protein, 6 aa, synthetic construct
QRKRKQ

SEQ ID NO: 846 - protein, 4 aa, synthetic construct
GGGS

SEQ ID NO: 847 - protein, 5 aa, synthetic construct
GGGGS

SEQ ID NO: 848 - protein, 9 aa, synthetic construct
PAAKRVKLD

SEQ ID NO: 849 - protein, 8 aa, synthetic construct
PPKKARED

SEQ ID NO: 850 - protein, 8 aa, synthetic construct
PQPKKKPL

SEQ ID NO: 851 - protein, 5 aa, synthetic construct
DRLRR

SEQ ID NO: 852 - protein, 7 aa, synthetic construct
PKQKKRK

SEQ ID NO: 853 - protein, 4 aa, synthetic construct
GGGG

SEQ ID NO: 854 - protein, 7 aa, synthetic construct
DQSNLRA

SEQ ID NO: 855 - protein, 7 aa, synthetic construct
RPYTLRL

SEQ ID NO: 856 - protein, 7 aa, synthetic construct
TSGSLTR

SEQ ID NO: 857 - protein, 7 aa, synthetic construct
AQCCLFH

SEQ ID NO: 858 - protein, 7 aa, synthetic construct
STGNLTN

SEQ ID NO: 859 - protein, 7 aa, synthetic construct
SRGALKT

SEQ ID NO: 860 - protein, 7 aa, synthetic construct
RNFSLTM

SEQ ID NO: 861 - protein, 7 aa, synthetic construct
SNGNLRN

SEQ ID NO: 862 - protein, 7 aa, synthetic construct
SSYNLAN

SEQ ID NO: 863 - protein, 7 aa, synthetic construct
RSDHLTQ

SEQ ID NO: 864 - protein, 7 aa, synthetic construct
QSGHLAR

SEQ ID NO: 865 - protein, 7 aa, synthetic construct
QKGTLGE

SEQ ID NO: 866 - protein, 7 aa, synthetic construct
QSSDLSR

SEQ ID NO: 867 - protein, 7 aa, synthetic construct
RRDNLHS

SEQ ID NO: 868 - protein, 7 aa, synthetic construct
RHRDLSR

SEQ ID NO: 869 - protein, 7 aa, synthetic construct
RNDHRTT

SEQ ID NO: 870 - protein, 7 aa, synthetic construct
QKAHLIR

SEQ ID NO: 871 - protein, 7 aa, synthetic construct
RGRDLSR

SEQ ID NO: 872 - protein, 7 aa, synthetic construct
QRAHLTR

SEQ ID NO: 873 - protein, 7 aa, synthetic construct
HRNTLVR

SEQ ID NO: 874 - protein, 7 aa, synthetic construct
QSGTRNH

SEQ ID NO: 875 - protein, 7 aa, synthetic construct
LKRTLKR

SEQ ID NO: 876 - DNA, 15 bp, synthetic construct
  source 1..15: mol_type = other DNA
actcctgtggagaag

SEQ ID NO: 877 - protein, 5 aa, synthetic construct
TPVEK

SEQ ID NO: 878 - RNA, 20 nt, synthetic construct
  source 1..20: mol_type = other RNA
  modified_base 1: mod_base = OTHER; note = 2'-O-methyl modified nucleotide
  modified_base 2: mod_base = OTHER; note = 2'-O-methyl modified nucleotide
  modified_base 3: mod_base = OTHER; note = 2'-O-methyl modified nucleotide
  modified_base 4: mod_base = OTHER; note = 2'-O-methyl modified nucleotide
  modified_base 5: mod_base = OTHER; note = 2'-O-methyl modified nucleotide
  modified_base 6: mod_base = OTHER; note = 2'-O-methyl modified nucleotide
  modified_base 7: mod_base = OTHER; note = 2'-O-methyl modified nucleotide
  modified_base 8: mod_base = OTHER; note = 2'-O-methyl modified nucleotide
  modified_base 9: mod_base = OTHER; note = 2'-O-methyl modified nucleotide
  modified_base 10: mod_base = OTHER; note = 2'-O-methyl modified nucleotide
  modified_base 11: mod_base = OTHER; note = 2'-O-methyl modified nucleotide
  modified_base 12: mod_base = OTHER; note = 2'-O-methyl modified nucleotide
  modified_base 13: mod_base = OTHER; note = 2'-O-methyl modified nucleotide
  modified_base 14: mod_base = OTHER; note = 2'-O-methyl modified nucleotide
  modified_base 15: mod_base = OTHER; note = 2'-O-methyl modified nucleotide
  modified_base 16: mod_base = OTHER; note = 2'-O-methyl modified nucleotide
  modified_base 17: mod_base = OTHER; note = 2'-O-methyl modified nucleotide
  modified_base 18: mod_base = OTHER; note = 2'-O-methyl modified nucleotide
  modified_base 19: mod_base = OTHER; note = 2'-O-methyl modified nucleotide
  modified_base 20: mod_base = OTHER; note = 2'-O-methyl modified nucleotide
aatttctactaagtgtagat

SEQ ID NO: 879 - RNA, 20 nt, synthetic construct
  source 1..20: mol_type = other RNA
  modified_base 1: mod_base = OTHER; note = 2'-O-methyl modified nucleotide
  modified_base 3: mod_base = OTHER; note = 2'-O-methyl modified nucleotide
  modified_base 4: mod_base = OTHER; note = 2'-O-methyl modified nucleotide
  modified_base 5: mod_base = OTHER; note = 2'-O-methyl modified nucleotide
  modified_base 6: mod_base = OTHER; note = 2'-O-methyl modified nucleotide
  modified_base 7: mod_base = OTHER; note = 2'-O-methyl modified nucleotide
  modified_base 8: mod_base = OTHER; note = 2'-O-methyl modified nucleotide
  modified_base 9: mod_base = OTHER; note = 2'-O-methyl modified nucleotide
  modified_base 10: mod_base = OTHER; note = 2'-O-methyl modified nucleotide
  modified_base 11: mod_base = OTHER; note = 2'-O-methyl modified nucleotide
  modified_base 12: mod_base = OTHER; note = 2'-O-methyl modified nucleotide
  modified_base 13: mod_base = OTHER; note = 2'-O-methyl modified nucleotide
  modified_base 14: mod_base = OTHER; note = 2'-O-methyl modified nucleotide
  modified_base 15: mod_base = OTHER; note = 2'-O-methyl modified nucleotide
  modified_base 16: mod_base = OTHER; note = 2'-O-methyl modified nucleotide
  modified_base 17: mod_base = OTHER; note = 2'-O-methyl modified nucleotide
  modified_base 18: mod_base = OTHER; note = 2'-O-methyl modified nucleotide
  modified_base 19: mod_base = OTHER; note = 2'-O-methyl modified nucleotide
  modified_base 20: mod_base = OTHER; note = 2'-O-methyl modified nucleotide
aatttctactaagtgtagat

SEQ ID NO: 880 - RNA, 20 nt, synthetic construct
  source 1..20: mol_type = other RNA
  modified_base 1: mod_base = OTHER; note = 2'-O-methyl modified nucleotide
  modified_base 3: mod_base = OTHER; note = 2'-O-methyl modified nucleotide
  modified_base 4: mod_base = OTHER; note = 2'-O-methyl modified nucleotide
  modified_base 5: mod_base = OTHER; note = 2'-O-methyl modified nucleotide
  modified_base 6: mod_base = OTHER; note = 2'-O-methyl modified nucleotide
  modified_base 7: mod_base = OTHER; note = 2'-O-methyl modified nucleotide
  modified_base 8: mod_base = OTHER; note = 2'-O-methyl modified nucleotide
  modified_base 9: mod_base = OTHER; note = 2'-O-methyl modified nucleotide
  modified_base 10: mod_base = OTHER; note = 2'-O-methyl modified nucleotide
  modified_base 11: mod_base = OTHER; note = 2'-O-methyl modified nucleotide
  modified_base 12: mod_base = OTHER; note = 2'-O-methyl modified nucleotide
  modified_base 13: mod_base = OTHER; note = 2'-O-methyl modified nucleotide
  modified_base 14: mod_base = OTHER; note = 2'-O-methyl modified nucleotide
  modified_base 16: mod_base = OTHER; note = 2'-O-methyl modified nucleotide
  modified_base 17: mod_base = OTHER; note = 2'-O-methyl modified nucleotide
  modified_base 18: mod_base = OTHER; note = 2'-O-methyl modified nucleotide
  modified_base 19: mod_base = OTHER; note = 2'-O-methyl modified nucleotide
  modified_base 20: mod_base = OTHER; note = 2'-O-methyl modified nucleotide
aatttctactaagtgtagat

SEQ ID NO: 881 - RNA, 20 nt, synthetic construct
  source 1..20: mol_type = other RNA
  modified_base 1: mod_base = OTHER; note = 2'-O-methyl modified nucleotide
  modified_base 3: mod_base = OTHER; note = 2'-O-methyl modified nucleotide
  modified_base 4: mod_base = OTHER; note = 2'-O-methyl modified nucleotide
  modified_base 5: mod_base = OTHER; note = 2'-O-methyl modified nucleotide
  modified_base 6: mod_base = OTHER; note = 2'-O-methyl modified nucleotide
  modified_base 7: mod_base = OTHER; note = 2'-O-methyl modified nucleotide
  modified_base 8: mod_base = OTHER; note = 2'-O-methyl modified nucleotide
  modified_base 9: mod_base = OTHER; note = 2'-O-methyl modified nucleotide
  modified_base 11: mod_base = OTHER; note = 2'-O-methyl modified nucleotide
  modified_base 12: mod_base = OTHER; note = 2'-O-methyl modified nucleotide
  modified_base 13: mod_base = OTHER; note = 2'-O-methyl modified nucleotide
  modified_base 14: mod_base = OTHER; note = 2'-O-methyl modified nucleotide
  modified_base 16: mod_base = OTHER; note = 2'-O-methyl modified nucleotide
  modified_base 17: mod_base = OTHER; note = 2'-O-methyl modified nucleotide
  modified_base 18: mod_base = OTHER; note = 2'-O-methyl modified nucleotide
  modified_base 19: mod_base = OTHER; note = 2'-O-methyl modified nucleotide
  modified_base 20: mod_base = OTHER; note = 2'-O-methyl modified nucleotide
aatttctactaagtgtagat

SEQ ID NO: 882 - RNA, 20 nt, synthetic construct
  source 1..20: mol_type = other RNA
  modified_base 3: mod_base = OTHER; note = 2'-O-methyl modified nucleotide
  modified_base 4: mod_base = OTHER; note = 2'-O-methyl modified nucleotide
  modified_base 5: mod_base = OTHER; note = 2'-O-methyl modified nucleotide
  modified_base 6: mod_base = OTHER; note = 2'-O-methyl modified nucleotide
  modified_base 7: mod_base = OTHER; note = 2'-O-methyl modified nucleotide
  modified_base 8: mod_base = OTHER; note = 2'-O-methyl modified nucleotide
  modified_base 9: mod_base = OTHER; note = 2'-O-methyl modified nucleotide
  modified_base 11: mod_base = OTHER; note = 2'-O-methyl modified nucleotide
  modified_base 12: mod_base = OTHER; note = 2'-O-methyl modified nucleotide
  modified_base 13: mod_base = OTHER; note = 2'-O-methyl modified nucleotide
  modified_base 14: mod_base = OTHER; note = 2'-O-methyl modified nucleotide
  modified_base 16: mod_base = OTHER; note = 2'-O-methyl modified nucleotide
  modified_base 17: mod_base = OTHER; note = 2'-O-methyl modified nucleotide
  modified_base 18: mod_base = OTHER; note = 2'-O-methyl modified nucleotide
  modified_base 19: mod_base = OTHER; note = 2'-O-methyl modified nucleotide
  modified_base 20: mod_base = OTHER; note = 2'-O-methyl modified nucleotide
aatttctactaagtgtagat

SEQ ID NO: 883 - RNA, 20 nt, synthetic construct
  source 1..20: mol_type = other RNA
  modified_base 4: mod_base = OTHER; note = 2'-O-methyl modified nucleotide
  modified_base 5: mod_base = OTHER; note = 2'-O-methyl modified nucleotide
  modified_base 6: mod_base = OTHER; note = 2'-O-methyl modified nucleotide
  modified_base 7: mod_base = OTHER; note = 2'-O-methyl modified nucleotide
  modified_base 8: mod_base = OTHER; note = 2'-O-methyl modified nucleotide
  modified_base 9: mod_base = OTHER; note = 2'-O-methyl modified nucleotide
  modified_base 11: mod_base = OTHER; note = 2'-O-methyl modified nucleotide
  modified_base 12: mod_base = OTHER; note = 2'-O-methyl modified nucleotide
  modified_base 13: mod_base = OTHER; note = 2'-O-methyl modified nucleotide
  modified_base 14: mod_base = OTHER; note = 2'-O-methyl modified nucleotide
  modified_base 16: mod_base = OTHER; note = 2'-O-methyl modified nucleotide
  modified_base 17: mod_base = OTHER; note = 2'-O-methyl modified nucleotide
  modified_base 18: mod_base = OTHER; note = 2'-O-methyl modified nucleotide
  modified_base 19: mod_base = OTHER; note = 2'-O-methyl modified nucleotide
  modified_base 20: mod_base = OTHER; note = 2'-O-methyl modified nucleotide
aatttctactaagtgtagat

SEQ ID NO: 884 - RNA, 20 nt, synthetic construct
  source 1..20: mol_type = other RNA
  modified_base 4: mod_base = OTHER; note = 2'-O-methyl modified nucleotide
  modified_base 5: mod_base = OTHER; note = 2'-O-methyl modified nucleotide
  modified_base 6: mod_base = OTHER; note = 2'-O-methyl modified nucleotide
  modified_base 7: mod_base = OTHER; note = 2'-O-methyl modified nucleotide
  modified_base 8: mod_base = OTHER; note = 2'-O-methyl modified nucleotide
  modified_base 9: mod_base = OTHER; note = 2'-O-methyl modified nucleotide
  modified_base 12: mod_base = OTHER; note = 2'-O-methyl modified nucleotide
  modified_base 13: mod_base = OTHER; note = 2'-O-methyl modified nucleotide
  modified_base 14: mod_base = OTHER; note = 2'-O-methyl modified nucleotide
  modified_base 16: mod_base = OTHER; note = 2'-O-methyl modified nucleotide
  modified_base 17: mod_base = OTHER; note = 2'-O-methyl modified nucleotide
  modified_base 18: mod_base = OTHER; note = 2'-O-methyl modified nucleotide
  modified_base 19: mod_base = OTHER; note = 2'-O-methyl modified nucleotide
  modified_base 20: mod_base = OTHER; note = 2'-O-methyl modified nucleotide
aatttctactaagtgtagat

SEQ ID NO: 885 - RNA, 20 nt, synthetic construct
  source 1..20: mol_type = other RNA
  modified_base 4: mod_base = OTHER; note = 2'-O-methyl modified nucleotide
  modified_base 5: mod_base = OTHER; note = 2'-O-methyl modified nucleotide
  modified_base 6: mod_base = OTHER; note = 2'-O-methyl modified nucleotide
  modified_base 7: mod_base = OTHER; note = 2'-O-methyl modified nucleotide
  modified_base 8: mod_base = OTHER; note = 2'-O-methyl modified nucleotide
  modified_base 9: mod_base = OTHER; note = 2'-O-methyl modified nucleotide
  modified_base 12: mod_base = OTHER; note = 2'-O-methyl modified nucleotide
  modified_base 13: mod_base = OTHER; note = 2'-O-methyl modified nucleotide
  modified_base 14: mod_base = OTHER; note = 2'-O-methyl modified nucleotide
  modified_base 16: mod_base = OTHER; note = 2'-O-methyl modified nucleotide
  modified_base 17: mod_base = OTHER; note = 2'-O-methyl modified nucleotide
  modified_base 18: mod_base = OTHER; note = 2'-O-methyl modified nucleotide
  modified_base 19: mod_base = OTHER; note = 2'-O-methyl modified nucleotide
aatttctactaagtgtagat

SEQ ID NO: 886 - RNA, 20 nt, synthetic construct
  source 1..20: mol_type = other RNA
  modified_base 4: mod_base = OTHER; note = 2'-O-methyl modified nucleotide
  modified_base 5: mod_base = OTHER; note = 2'-O-methyl modified nucleotide
  modified_base 6: mod_base = OTHER; note = 2'-O-methyl modified nucleotide
  modified_base 7: mod_base = OTHER; note = 2'-O-methyl modified nucleotide
  modified_base 8: mod_base = OTHER; note = 2'-O-methyl modified nucleotide
  modified_base 9: mod_base = OTHER; note = 2'-O-methyl modified nucleotide
  modified_base 12: mod_base = OTHER; note = 2'-O-methyl modified nucleotide
  modified_base 13: mod_base = OTHER; note = 2'-O-methyl modified nucleotide
  modified_base 14: mod_base = OTHER; note = 2'-O-methyl modified nucleotide
  modified_base 17: mod_base = OTHER; note = 2'-O-methyl modified nucleotide
  modified_base 18: mod_base = OTHER; note = 2'-O-methyl modified nucleotide
  modified_base 19: mod_base = OTHER; note = 2'-O-methyl modified nucleotide
aatttctactaagtgtagat

SEQ ID NO: 887 - RNA, 20 nt, synthetic construct
  source 1..20: mol_type = other RNA
  modified_base 4: mod_base = OTHER; note = 2'-O-methyl modified nucleotide
  modified_base 6: mod_base = OTHER; note = 2'-O-methyl modified nucleotide
  modified_base 8: mod_base = OTHER; note = 2'-O-methyl modified nucleotide
  modified_base 9: mod_base = OTHER; note = 2'-O-methyl modified nucleotide
  modified_base 12: mod_base = OTHER; note = 2'-O-methyl modified nucleotide
  modified_base 13: mod_base = OTHER; note = 2'-O-methyl modified nucleotide
  modified_base 14: mod_base = OTHER; note = 2'-O-methyl modified nucleotide
  modified_base 16: mod_base = OTHER; note = 2'-O-methyl modified nucleotide
  modified_base 17: mod_base = OTHER; note = 2'-O-methyl modified nucleotide
  modified_base 18: mod_base = OTHER; note = 2'-O-methyl modified nucleotide
  modified_base 19: mod_base = OTHER; note = 2'-O-methyl modified nucleotide
aatttctactaagtgtagat

SEQ ID NO: 888 - RNA, 20 nt, synthetic construct
  source 1..20: mol_type = other RNA
  modified_base 4: mod_base = OTHER; note = 2'-O-methyl modified nucleotide
  modified_base 6: mod_base = OTHER; note = 2'-O-methyl modified nucleotide
  modified_base 8: mod_base = OTHER; note = 2'-O-methyl modified nucleotide
  modified_base 9: mod_base = OTHER; note = 2'-O-methyl modified nucleotide
  modified_base 12: mod_base = OTHER; note = 2'-O-methyl modified nucleotide
  modified_base 13: mod_base = OTHER; note = 2'-O-methyl modified nucleotide
  modified_base 14: mod_base = OTHER; note = 2'-O-methyl modified nucleotide
  modified_base 17: mod_base = OTHER; note = 2'-O-methyl modified nucleotide
  modified_base 18: mod_base = OTHER; note = 2'-O-methyl modified nucleotide
  modified_base 19: mod_base = OTHER; note = 2'-O-methyl modified nucleotide
aatttctactaagtgtagat

SEQ ID NO: 889 - RNA, 20 nt, synthetic construct
  source 1..20: mol_type = other RNA
  modified_base 4: mod_base = OTHER; note = 2'-O-methyl modified nucleotide
  modified_base 6: mod_base = OTHER; note = 2'-O-methyl modified nucleotide
  modified_base 8: mod_base = OTHER; note = 2'-O-methyl modified nucleotide
  modified_base 9: mod_base = OTHER; note = 2'-O-methyl modified nucleotide
  modified_base 12: mod_base = OTHER; note = 2'-O-methyl modified nucleotide
  modified_base 13: mod_base = OTHER; note = 2'-O-methyl modified nucleotide
  modified_base 14: mod_base = OTHER; note = 2'-O-methyl modified nucleotide
  modified_base 17: mod_base = OTHER; note = 2'-O-methyl modified nucleotide
  modified_base 18: mod_base = OTHER; note = 2'-O-methyl modified nucleotide
aatttctactaagtgtagat

SEQ ID NO: 890 - RNA, 20 nt, synthetic construct
  source 1..20: mol_type = other RNA
  modified_base 4: mod_base = OTHER; note = 2'-O-methyl modified nucleotide
  modified_base 6: mod_base = OTHER; note = 2'-O-methyl modified nucleotide
  modified_base 8: mod_base = OTHER; note = 2'-O-methyl modified nucleotide
  modified_base 9: mod_base = OTHER; note = 2'-O-methyl modified nucleotide
  modified_base 12: mod_base = OTHER; note = 2'-O-methyl modified nucleotide
  modified_base 13: mod_base = OTHER; note = 2'-O-methyl modified nucleotide
  modified_base 14: mod_base = OTHER; note = 2'-O-methyl modified nucleotide
  modified_base 17: mod_base = OTHER; note = 2'-O-methyl modified nucleotide
aatttctactaagtgtagat

SEQ ID NO: 891 - RNA, 20 nt, synthetic construct
  source 1..20: mol_type = other RNA
  modified_base 4: mod_base = OTHER; note = 2'-O-methyl modified nucleotide
  modified_base 6: mod_base = OTHER; note = 2'-O-methyl modified nucleotide
  modified_base 9: mod_base = OTHER; note = 2'-O-methyl modified nucleotide
  modified_base 12: mod_base = OTHER; note = 2'-O-methyl modified nucleotide
  modified_base 13: mod_base = OTHER; note = 2'-O-methyl modified nucleotide
  modified_base 14: mod_base = OTHER; note = 2'-O-methyl modified nucleotide
  modified_base 17: mod_base = OTHER; note = 2'-O-methyl modified nucleotide
aatttctactaagtgtagat

SEQ ID NO: 892 - RNA, 20 nt, synthetic construct
  source 1..20: mol_type = other RNA
  modified_base 4: mod_base = OTHER; note = 2'-O-methyl modified nucleotide
  modified_base 9: mod_base = OTHER; note = 2'-O-methyl modified nucleotide
  modified_base 12: mod_base = OTHER; note = 2'-O-methyl modified nucleotide
  modified_base 13: mod_base = OTHER; note = 2'-O-methyl modified nucleotide
  modified_base 14: mod_base = OTHER; note = 2'-O-methyl modified nucleotide
  modified_base 17: mod_base = OTHER; note = 2'-O-methyl modified nucleotide
aatttctactaagtgtagat

SEQ ID NO: 893 - RNA, 20 nt, synthetic construct
  source 1..20: mol_type = other RNA
  modified_base 4: mod_base = OTHER; note = 2'-O-methyl modified nucleotide
  modified_base 9: mod_base = OTHER; note = 2'-O-methyl modified nucleotide
  modified_base 12: mod_base = OTHER; note = 2'-O-methyl modified nucleotide
  modified_base 14: mod_base = OTHER; note = 2'-O-methyl modified nucleotide
  modified_base 17: mod_base = OTHER; note = 2'-O-methyl modified nucleotide
aatttctactaagtgtagat

SEQ ID NO: 894 - RNA, 20 nt, synthetic construct
  source 1..20: mol_type = other RNA
  modified_base 9: mod_base = OTHER; note = 2'-O-methyl modified nucleotide
  modified_base 12: mod_base = OTHER; note = 2'-O-methyl modified nucleotide
  modified_base 14: mod_base = OTHER; note = 2'-O-methyl modified nucleotide
  modified_base 17: mod_base = OTHER; note = 2'-O-methyl modified nucleotide
aatttctactaagtgtagat

SEQ ID NO: 895 - RNA, 20 nt, synthetic construct
  source 1..20: mol_type = other RNA
  modified_base 9: mod_base = OTHER; note = 2'-O-methyl modified nucleotide
  modified_base 14: mod_base = OTHER; note = 2'-O-methyl modified nucleotide
  modified_base 17: mod_base = OTHER; note = 2'-O-methyl modified nucleotide
aatttctactaagtgtagat

SEQ ID NO: 896 - RNA, 19 nt, synthetic construct
  source 1..19: mol_type = other RNA
  modified_base 1: mod_base = OTHER; note = 2'-O-methyl modified nucleotide
  modified_base 2: mod_base = OTHER; note = 2'-O-methyl modified nucleotide
  modified_base 3: mod_base = OTHER; note = 2'-O-methyl modified nucleotide
  modified_base 4: mod_base = OTHER; note = 2'-O-methyl modified nucleotide
  modified_base 5: mod_base = OTHER; note = 2'-O-methyl modified nucleotide
  modified_base 6: mod_base = OTHER; note = 2'-O-methyl modified nucleotide
  modified_base 7: mod_base = OTHER; note = 2'-O-methyl modified nucleotide
  modified_base 8: mod_base = OTHER; note = 2'-O-methyl modified nucleotide
  modified_base 9: mod_base = OTHER; note = 2'-O-methyl modified nucleotide
  modified_base 10: mod_base = OTHER; note = 2'-O-methyl modified nucleotide
  modified_base 11: mod_base = OTHER; note = 2'-O-methyl modified nucleotide
  modified_base 12: mod_base = OTHER; note = 2'-O-methyl modified nucleotide
  modified_base 13: mod_base = OTHER; note = 2'-O-methyl modified nucleotide
  modified_base 14: mod_base = OTHER; note = 2'-O-methyl modified nucleotide
  modified_base 15: mod_base = OTHER; note = 2'-O-methyl modified nucleotide
  modified_base 16: mod_base = OTHER; note = 2'-O-methyl modified nucleotide
  modified_base 17: mod_base = OTHER; note = 2'-O-methyl modified nucleotide
  modified_base 18: mod_base = OTHER; note = 2'-O-methyl modified nucleotide
  modified_base 19: mod_base = OTHER; note = 2'-O-methyl modified nucleotide
aatttctactcttgtagat

SEQ ID NO: 897 - RNA, 19 nt, synthetic construct
  source 1..19: mol_type = other RNA
  modified_base 1: mod_base = OTHER; note = 2'-O-methyl modified nucleotide
  modified_base 2: mod_base = OTHER; note = 2'-O-methyl modified nucleotide
  modified_base 4: mod_base = OTHER; note = 2'-O-methyl modified nucleotide
  modified_base 5: mod_base = OTHER; note = 2'-O-methyl modified nucleotide
  modified_base 6: mod_base = OTHER; note = 2'-O-methyl modified nucleotide
  modified_base 7: mod_base = OTHER; note = 2'-O-methyl modified nucleotide
  modified_base 8: mod_base = OTHER; note = 2'-O-methyl modified nucleotide
  modified_base 9: mod_base = OTHER; note = 2'-O-methyl modified nucleotide
  modified_base 10: mod_base = OTHER; note = 2'-O-methyl modified nucleotide
  modified_base 11: mod_base = OTHER; note = 2'-O-methyl modified nucleotide
  modified_base 12: mod_base = OTHER; note = 2'-O-methyl modified nucleotide
  modified_base 13: mod_base = OTHER; note = 2'-O-methyl modified nucleotide
  modified_base 14: mod_base = OTHER; note = 2'-O-methyl modified nucleotide
  modified_base 15: mod_base = OTHER; note = 2'-O-methyl modified nucleotide
  modified_base 16: mod_base = OTHER; note = 2'-O-methyl modified nucleotide
  modified_base 17: mod_base = OTHER; note = 2'-O-methyl modified nucleotide
  modified_base 18: mod_base = OTHER; note = 2'-O-methyl modified nucleotide
  modified_base 19: mod_base = OTHER; note = 2'-O-methyl modified nucleotide
aatttctactcttgtagat

SEQ ID NO: 898 - RNA, 19 nt, synthetic construct
  source 1..19: mol_type = other RNA
  modified_base 1: mod_base = OTHER; note = 2'-O-methyl modified nucleotide
  modified_base 4: mod_base = OTHER; note = 2'-O-methyl modified nucleotide
  modified_base 5: mod_base = OTHER; note = 2'-O-methyl modified nucleotide
  modified_base 6: mod_base = OTHER; note = 2'-O-methyl modified nucleotide
  modified_base 7: mod_base = OTHER; note = 2'-O-methyl modified nucleotide
  modified_base 8: mod_base = OTHER; note = 2'-O-methyl modified nucleotide
  modified_base 9: mod_base = OTHER; note = 2'-O-methyl modified nucleotide
  modified_base 10: mod_base = OTHER; note = 2'-O-methyl modified nucleotide
  modified_base 11: mod_base = OTHER; note = 2'-O-methyl modified nucleotide
  modified_base 12: mod_base = OTHER; note = 2'-O-methyl modified nucleotide
  modified_base 13: mod_base = OTHER; note = 2'-O-methyl modified nucleotide
  modified_base 14: mod_base = OTHER; note = 2'-O-methyl modified nucleotide
  modified_base 15: mod_base = OTHER; note = 2'-O-methyl modified nucleotide
  modified_base 16: mod_base = OTHER; note = 2'-O-methyl modified nucleotide
  modified_base 17: mod_base = OTHER; note = 2'-O-methyl modified nucleotide
  modified_base 18: mod_base = OTHER; note = 2'-O-methyl modified nucleotide
  modified_base 19: mod_base = OTHER; note = 2'-O-methyl modified nucleotide
aatttctactcttgtagat

SEQ ID NO: 899 - RNA, 19 nt, synthetic construct
  source 1..19: mol_type = other RNA
  modified_base 4: mod_base = OTHER; note = 2'-O-methyl modified nucleotide
  modified_base 5: mod_base = OTHER; note = 2'-O-methyl modified nucleotide
  modified_base 6: mod_base = OTHER; note = 2'-O-methyl modified nucleotide
  modified_base 7: mod_base = OTHER; note = 2'-O-methyl modified nucleotide
  modified_base 8: mod_base = OTHER; note = 2'-O-methyl modified nucleotide
  modified_base 9: mod_base = OTHER; note = 2'-O-methyl modified nucleotide
  modified_base 10: mod_base = OTHER; note = 2'-O-methyl modified nucleotide
  modified_base 11: mod_base = OTHER; note = 2'-O-methyl modified nucleotide
  modified_base 12: mod_base = OTHER; note = 2'-O-methyl modified nucleotide
  modified_base 13: mod_base = OTHER; note = 2'-O-methyl modified nucleotide
  modified_base 14: mod_base = OTHER; note = 2'-O-methyl modified nucleotide
  modified_base 15: mod_base = OTHER; note = 2'-O-methyl modified nucleotide
  modified_base 16: mod_base = OTHER; note = 2'-O-methyl modified nucleotide
  modified_base 17: mod_base = OTHER; note = 2'-O-methyl modified nucleotide
  modified_base 18: mod_base = OTHER; note = 2'-O-methyl modified nucleotide
  modified_base 19: mod_base = OTHER; note = 2'-O-methyl modified nucleotide
aatttctactcttgtagat

SEQ ID NO: 900 - RNA, 19 nt, synthetic construct
  source 1..19: mol_type = other RNA
  modified_base 4: mod_base = OTHER; note = 2'-O-methyl modified nucleotide
  modified_base 5: mod_base = OTHER; note = 2'-O-methyl modified nucleotide
  modified_base 6: mod_base = OTHER; note = 2'-O-methyl modified nucleotide
  modified_base 7: mod_base = OTHER; note = 2'-O-methyl modified nucleotide
  modified_base 8: mod_base = OTHER; note = 2'-O-methyl modified nucleotide
  modified_base 9: mod_base = OTHER; note = 2'-O-methyl modified nucleotide
  modified_base 10: mod_base = OTHER; note = 2'-O-methyl modified nucleotide
  modified_base 11: mod_base = OTHER; note = 2'-O-methyl modified nucleotide
  modified_base 12: mod_base = OTHER; note = 2'-O-methyl modified nucleotide
  modified_base 13: mod_base = OTHER; note = 2'-O-methyl modified nucleotide
  modified_base 14: mod_base = OTHER; note = 2'-O-methyl modified nucleotide
  modified_base 15: mod_base = OTHER; note = 2'-O-methyl modified nucleotide
  modified_base 16: mod_base = OTHER; note = 2'-O-methyl modified nucleotide
  modified_base 17: mod_base = OTHER; note = 2'-O-methyl modified nucleotide
  modified_base 18: mod_base = OTHER; note = 2'-O-methyl modified nucleotide
aatttctactcttgtagat

SEQ ID NO: 901 - RNA, 19 nt, synthetic construct
  source 1..19: mol_type = other RNA
  modified_base 4: mod_base = OTHER; note = 2'-O-methyl modified nucleotide
  modified_base 5: mod_base = OTHER; note = 2'-O-methyl modified nucleotide
  modified_base 6: mod_base = OTHER; note = 2'-O-methyl modified nucleotide
  modified_base 7: mod_base = OTHER; note = 2'-O-methyl modified nucleotide
  modified_base 8: mod_base = OTHER; note = 2'-O-methyl modified nucleotide
  modified_base 9: mod_base = OTHER; note = 2'-O-methyl modified nucleotide
  modified_base 11: mod_base = OTHER; note = 2'-O-methyl modified nucleotide
  modified_base 12: mod_base = OTHER; note = 2'-O-methyl modified nucleotide
  modified_base 13: mod_base = OTHER; note = 2'-O-methyl modified nucleotide
  modified_base 14: mod_base = OTHER; note = 2'-O-methyl modified nucleotide
  modified_base 15: mod_base = OTHER; note = 2'-O-methyl modified nucleotide
  modified_base 16: mod_base = OTHER; note = 2'-O-methyl modified nucleotide
  modified_base 17: mod_base = OTHER; note = 2'-O-methyl modified nucleotide
  modified_base 18: mod_base = OTHER; note = 2'-O-methyl modified nucleotide
aatttctactcttgtagat

SEQ ID NO: 902 - RNA, 19 nt, synthetic construct
  source 1..19: mol_type = other RNA
  modified_base 4: mod_base = OTHER; note = 2'-O-methyl modified nucleotide
  modified_base 5: mod_base = OTHER; note = 2'-O-methyl modified nucleotide
  modified_base 6: mod_base = OTHER; note = 2'-O-methyl modified nucleotide
  modified_base 8: mod_base = OTHER; note = 2'-O-methyl modified nucleotide
  modified_base 9: mod_base = OTHER; note = 2'-O-methyl modified nucleotide
  modified_base 11: mod_base = OTHER; note = 2'-O-methyl modified nucleotide
  modified_base 12: mod_base = OTHER; note = 2'-O-methyl modified nucleotide
  modified_base 13: mod_base = OTHER; note = 2'-O-methyl modified nucleotide
  modified_base 14: mod_base = OTHER; note = 2'-O-methyl modified nucleotide
  modified_base 15: mod_base = OTHER; note = 2'-O-methyl modified nucleotide
  modified_base 16: mod_base = OTHER; note = 2'-O-methyl modified nucleotide
  modified_base 17: mod_base = OTHER; note = 2'-O-methyl modified nucleotide
  modified_base 18: mod_base = OTHER; note = 2'-O-methyl modified nucleotide
aatttctactcttgtagat

SEQ ID NO: 903 - RNA, 19 nt, synthetic construct
  source 1..19: mol_type = other RNA
  modified_base 4: mod_base = OTHER; note = 2'-O-methyl modified nucleotide
  modified_base 5: mod_base = OTHER; note = 2'-O-methyl modified nucleotide
  modified_base 8: mod_base = OTHER; note = 2'-O-methyl modified nucleotide
  modified_base 9: mod_base = OTHER; note = 2'-O-methyl modified nucleotide
  modified_base 11: mod_base = OTHER; note = 2'-O-methyl modified nucleotide
  modified_base 12: mod_base = OTHER; note = 2'-O-methyl modified nucleotide
  modified_base 13: mod_base = OTHER; note = 2'-O-methyl modified nucleotide
  modified_base 14: mod_base = OTHER; note = 2'-O-methyl modified nucleotide
  modified_base 15: mod_base = OTHER; note = 2'-O-methyl modified nucleotide
  modified_base 16: mod_base = OTHER; note = 2'-O-methyl modified nucleotide
  modified_base 17: mod_base = OTHER; note = 2'-O-methyl modified nucleotide
  modified_base 18: mod_base = OTHER; note = 2'-O-methyl modified nucleotide
aatttctactcttgtagat

SEQ ID NO: 904 - RNA, 19 nt, synthetic construct
  source 1..19: mol_type = other RNA
  modified_base 4: mod_base = OTHER; note = 2'-O-methyl modified nucleotide
  modified_base 5: mod_base = OTHER; note = 2'-O-methyl modified nucleotide
  modified_base 8: mod_base = OTHER; note = 2'-O-methyl modified nucleotide
  modified_base 9: mod_base = OTHER; note = 2'-O-methyl modified nucleotide
  modified_base 11: mod_base = OTHER; note = 2'-O-methyl modified nucleotide
  modified_base 12: mod_base = OTHER; note = 2'-O-methyl modified nucleotide
  modified_base 13: mod_base = OTHER; note = 2'-O-methyl modified nucleotide
  modified_base 14: mod_base = OTHER; note = 2'-O-methyl modified nucleotide
  modified_base 15: mod_base = OTHER; note = 2'-O-methyl modified nucleotide
  modified_base 16: mod_base = OTHER; note = 2'-O-methyl modified nucleotide
  modified_base 17: mod_base = OTHER; note = 2'-O-methyl modified nucleotide
aatttctactcttgtagat

SEQ ID NO: 905 - RNA, 19 nt, synthetic construct
  source 1..19: mol_type = other RNA
  modified_base 4: mod_base = OTHER; note = 2'-O-methyl modified nucleotide
  modified_base 5: mod_base = OTHER; note = 2'-O-methyl modified nucleotide
  modified_base 8: mod_base = OTHER; note = 2'-O-methyl modified nucleotide
  modified_base 9: mod_base = OTHER; note = 2'-O-methyl modified nucleotide
  modified_base 11: mod_base = OTHER; note = 2'-O-methyl modified nucleotide
  modified_base 12: mod_base = OTHER; note = 2'-O-methyl modified nucleotide
  modified_base 13: mod_base = OTHER; note = 2'-O-methyl modified nucleotide
  modified_base 14: mod_base = OTHER; note = 2'-O-methyl modified nucleotide
  modified_base 15: mod_base = OTHER; note = 2'-O-methyl modified nucleotide
  modified_base 16: mod_base = OTHER; note = 2'-O-methyl modified nucleotide
aatttctactcttgtagat

SEQ ID NO: 906 - RNA, 19 nt, synthetic construct
  source 1..19: mol_type = other RNA
  modified_base 4: mod_base = OTHER; note = 2'-O-methyl modified nucleotide
  modified_base 5: mod_base = OTHER; note = 2'-O-methyl modified nucleotide
  modified_base 8: mod_base = OTHER; note = 2'-O-methyl modified nucleotide
  modified_base 9: mod_base = OTHER; note = 2'-O-methyl modified nucleotide
  modified_base 11: mod_base = OTHER; note = 2'-O-methyl modified nucleotide
  modified_base 12: mod_base = OTHER; note = 2'-O-methyl modified nucleotide
  modified_base 13: mod_base = OTHER; note = 2'-O-methyl modified nucleotide
  modified_base 15: mod_base = OTHER; note = 2'-O-methyl modified nucleotide
  modified_base 16: mod_base = OTHER; note = 2'-O-methyl modified nucleotide
aatttctactcttgtagat

SEQ ID NO: 907 - RNA, 19 nt, synthetic construct
  source 1..19: mol_type = other RNA
  modified_base 5: mod_base = OTHER; note = 2'-O-methyl modified nucleotide
  modified_base 8: mod_base = OTHER; note = 2'-O-methyl modified nucleotide
  modified_base 9: mod_base = OTHER; note = 2'-O-methyl modified nucleotide
  modified_base 11: mod_base = OTHER; note = 2'-O-methyl modified nucleotide
  modified_base 12: mod_base = OTHER; note = 2'-O-methyl modified nucleotide
  modified_base 13: mod_base = OTHER; note = 2'-O-methyl modified nucleotide
  modified_base 15: mod_base = OTHER; note = 2'-O-methyl modified nucleotide
  modified_base 16: mod_base = OTHER; note = 2'-O-methyl modified nucleotide
aatttctactcttgtagat

SEQ ID NO: 908 - RNA, 19 nt, synthetic construct
  source 1..19: mol_type = other RNA
  modified_base 1: mod_base = OTHER; note = 2'-O-methyl modified nucleotide
  modified_base 2: mod_base = OTHER; note = 2'-O-methyl modified nucleotide
  modified_base 3: mod_base = OTHER; note = 2'-O-methyl modified nucleotide
  modified_base 4: mod_base = OTHER; note = 2'-O-methyl modified nucleotide
  modified_base 5: mod_base = OTHER; note = 2'-O-methyl modified nucleotide
  modified_base 6: mod_base = OTHER; note = 2'-O-methyl modified nucleotide
  modified_base 7: mod_base = OTHER; note = 2'-O-methyl modified nucleotide
  modified_base 8: mod_base = OTHER; note = 2'-O-methyl modified nucleotide
  modified_base 9: mod_base = OTHER; note = 2'-O-methyl modified nucleotide
  modified_base 10: mod_base = OTHER; note = 2'-O-methyl modified nucleotide
  modified_base 11: mod_base = OTHER; note = 2'-O-methyl modified nucleotide
  modified_base 12: mod_base = OTHER; note = 2'-O-methyl modified nucleotide
  modified_base 13: mod_base = OTHER; note = 2'-O-methyl modified nucleotide
  modified_base 14: mod_base = OTHER; note = 2'-O-methyl modified nucleotide
  modified_base 15: mod_base = OTHER; note = 2'-O-methyl modified nucleotide
  modified_base 16: mod_base = OTHER; note = 2'-O-methyl modified nucleotide
  modified_base 17: mod_base = OTHER; note = 2'-O-methyl modified nucleotide
  modified_base 18: mod_base = OTHER; note = 2'-O-methyl modified nucleotide
  modified_base 19: mod_base = OTHER; note = 2'-O-methyl modified nucleotide
aatttctactgttgtagat

SEQ ID NO: 909 - RNA, 19 nt, synthetic construct
  source 1..19: mol_type = other RNA
  modified_base 1: mod_base = OTHER; note = 2'-O-methyl modified nucleotide
  modified_base 2: mod_base = OTHER; note = 2'-O-methyl modified nucleotide
  modified_base 4: mod_base = OTHER; note = 2'-O-methyl modified nucleotide
  modified_base 5: mod_base = OTHER; note = 2'-O-methyl modified nucleotide
  modified_base 6: mod_base = OTHER; note = 2'-O-methyl modified nucleotide
  modified_base 7: mod_base = OTHER; note = 2'-O-methyl modified nucleotide
  modified_base 8: mod_base = OTHER; note = 2'-O-methyl modified nucleotide
  modified_base 9: mod_base = OTHER; note = 2'-O-methyl modified nucleotide
  modified_base 10: mod_base = OTHER; note = 2'-O-methyl modified nucleotide
  modified_base 11: mod_base = OTHER; note = 2'-O-methyl modified nucleotide
  modified_base 12: mod_base = OTHER; note = 2'-O-methyl modified nucleotide
  modified_base 13: mod_base = OTHER; note = 2'-O-methyl modified nucleotide
  modified_base 14: mod_base = OTHER; note = 2'-O-methyl modified nucleotide
  modified_base 15: mod_base = OTHER; note = 2'-O-methyl modified nucleotide
  modified_base 16: mod_base = OTHER; note = 2'-O-methyl modified nucleotide
  modified_base 17: mod_base = OTHER; note = 2'-O-methyl modified nucleotide
  modified_base 18: mod_base = OTHER; note = 2'-O-methyl modified nucleotide
  modified_base 19: mod_base = OTHER; note = 2'-O-methyl modified nucleotide
aatttctactgttgtagat

SEQ ID NO: 910 - RNA, 19 nt, synthetic construct
  source 1..19: mol_type = other RNA
  modified_base 1: mod_base = OTHER; note = 2'-O-methyl modified nucleotide
  modified_base 2: mod_base = OTHER; note = 2'-O-methyl modified nucleotide
  modified_base 4: mod_base = OTHER; note = 2'-O-methyl modified nucleotide
  modified_base 5: mod_base = OTHER; note = 2'-O-methyl modified nucleotide
  modified_base 6: mod_base = OTHER; note = 2'-O-methyl modified nucleotide
  modified_base 7: mod_base = OTHER; note = 2'-O-methyl modified nucleotide
  modified_base 8: mod_base = OTHER; note = 2'-O-methyl modified nucleotide
  modified_base 9: mod_base = OTHER; note = 2'-O-methyl modified nucleotide
  modified_base 11: mod_base = OTHER; note = 2'-O-methyl modified nucleotide
  modified_base 12: mod_base = OTHER; note = 2'-O-methyl modified nucleotide
  modified_base 13: mod_base = OTHER; note = 2'-O-methyl modified nucleotide
  modified_base 14: mod_base = OTHER; note = 2'-O-methyl modified nucleotide
  modified_base 15: mod_base = OTHER; note = 2'-O-methyl modified nucleotide
  modified_base 16: mod_base = OTHER; note = 2'-O-methyl modified nucleotide
  modified_base 17: mod_base = OTHER; note = 2'-O-methyl modified nucleotide
  modified_base 18: mod_base = OTHER; note = 2'-O-methyl modified nucleotide
  modified_base 19: mod_base = OTHER; note = 2'-O-methyl modified nucleotide
aatttctactgttgtagat

SEQ ID NO: 911 - RNA, 19 nt, synthetic construct
  source 1..19: mol_type = other RNA
  modified_base 1: mod_base = OTHER; note = 2'-O-methyl modified nucleotide
  modified_base 4: mod_base = OTHER; note = 2'-O-methyl modified nucleotide
  modified_base 5: mod_base = OTHER; note = 2'-O-methyl modified nucleotide
  modified_base 6: mod_base = OTHER; note = 2'-O-methyl modified nucleotide
  modified_base 7: mod_base = OTHER; note = 2'-O-methyl modified nucleotide
  modified_base 8: mod_base = OTHER; note = 2'-O-methyl modified nucleotide
  modified_base 9: mod_base = OTHER; note = 2'-O-methyl modified nucleotide
  modified_base 11: mod_base = OTHER; note = 2'-O-methyl modified nucleotide
  modified_base 12: mod_base = OTHER; note = 2'-O-methyl modified nucleotide
  modified_base 13: mod_base = OTHER; note = 2'-O-methyl modified nucleotide
  modified_base 14: mod_base = OTHER; note = 2'-O-methyl modified nucleotide
  modified_base 15: mod_base = OTHER; note = 2'-O-methyl modified nucleotide
  modified_base 16: mod_base = OTHER; note = 2'-O-methyl modified nucleotide
  modified_base 17: mod_base = OTHER; note = 2'-O-methyl modified nucleotide
  modified_base 18: mod_base = OTHER; note = 2'-O-methyl modified nucleotide
  modified_base 19: mod_base = OTHER; note = 2'-O-methyl modified nucleotide
aatttctactgttgtagat

SEQ ID NO: 912 - RNA, 19 nt, synthetic construct
  source 1..19: mol_type = other RNA
  modified_base 1: mod_base = OTHER; note = 2'-O-methyl modified nucleotide
  modified_base 4: mod_base = OTHER; note = 2'-O-methyl modified nucleotide
  modified_base 5: mod_base = OTHER; note = 2'-O-methyl modified nucleotide
  modified_base 6: mod_base = OTHER; note = 2'-O-methyl modified nucleotide
  modified_base 7: mod_base = OTHER; note = 2'-O-methyl modified nucleotide
  modified_base 8: mod_base = OTHER; note = 2'-O-methyl modified nucleotide
  modified_base 9: mod_base = OTHER; note = 2'-O-methyl modified nucleotide
  modified_base 12: mod_base = OTHER; note = 2'-O-methyl modified nucleotide
  modified_base 13: mod_base = OTHER; note = 2'-O-methyl modified nucleotide
  modified_base 14: mod_base = OTHER; note = 2'-O-methyl modified nucleotide
  modified_base 15: mod_base = OTHER; note = 2'-O-methyl modified nucleotide
  modified_base 16: mod_base = OTHER; note = 2'-O-methyl modified nucleotide
  modified_base 17: mod_base = OTHER; note = 2'-O-methyl modified nucleotide
  modified_base 18: mod_base = OTHER; note = 2'-O-methyl modified nucleotide
  modified_base 19: mod_base = OTHER; note = 2'-O-methyl modified nucleotide
aatttctactgttgtagat

SEQ ID NO: 913 - RNA, 19 nt, synthetic construct
  source 1..19: mol_type = other RNA
  modified_base 1: mod_base = OTHER; note = 2'-O-methyl modified nucleotide
  modified_base 4: mod_base = OTHER; note = 2'-O-methyl modified nucleotide
  modified_base 5: mod_base = OTHER; note = 2'-O-methyl modified nucleotide
  modified_base 6: mod_base = OTHER; note = 2'-O-methyl modified nucleotide
  modified_base 7: mod_base = OTHER; note = 2'-O-methyl modified nucleotide
  modified_base 9: mod_base = OTHER; note = 2'-O-methyl modified nucleotide
  modified_base 12: mod_base = OTHER; note = 2'-O-methyl modified nucleotide
  modified_base 13: mod_base = OTHER; note = 2'-O-methyl modified nucleotide
  modified_base 14: mod_base = OTHER; note = 2'-O-methyl modified nucleotide
  modified_base 15: mod_base = OTHER; note = 2'-O-methyl modified nucleotide
  modified_base 16: mod_base = OTHER; note = 2'-O-methyl modified nucleotide
  modified_base 17: mod_base = OTHER; note = 2'-O-methyl modified nucleotide
  modified_base 18: mod_base = OTHER; note = 2'-O-methyl modified nucleotide
  modified_base 19: mod_base = OTHER; note = 2'-O-methyl modified nucleotide
aatttctactgttgtagat

SEQ ID NO: 914 - RNA, 19 nt, synthetic construct
  source 1..19: mol_type = other RNA
  modified_base 1: mod_base = OTHER; note = 2'-O-methyl modified nucleotide
  modified_base 4: mod_base = OTHER; note = 2'-O-methyl modified nucleotide
  modified_base 5: mod_base = OTHER; note = 2'-O-methyl modified nucleotide
  modified_base 6: mod_base = OTHER; note = 2'-O-methyl modified nucleotide
  modified_base 7: mod_base = OTHER; note = 2'-O-methyl modified nucleotide
  modified_base 9: mod_base = OTHER; note = 2'-O-methyl modified nucleotide
  modified_base 12: mod_base = OTHER; note = 2'-O-methyl modified nucleotide
  modified_base 13: mod_base = OTHER; note = 2'-O-methyl modified nucleotide
  modified_base 14: mod_base = OTHER; note = 2'-O-methyl modified nucleotide
  modified_base 15: mod_base = OTHER; note = 2'-O-methyl modified nucleotide
  modified_base 16: mod_base = OTHER; note = 2'-O-methyl modified nucleotide
  modified_base 18: mod_base = OTHER; note = 2'-O-methyl modified nucleotide
  modified_base 19: mod_base = OTHER; note = 2'-O-methyl modified nucleotide
aatttctactgttgtagat

SEQ ID NO: 915 - RNA, 19 nt, synthetic construct
  source 1..19: mol_type = other RNA
  modified_base 1: mod_base = OTHER; note = 2'-O-methyl modified nucleotide
  modified_base 4: mod_base = OTHER; note = 2'-O-methyl modified nucleotide
  modified_base 5: mod_base = OTHER; note = 2'-O-methyl modified nucleotide
  modified_base 6: mod_base = OTHER; note = 2'-O-methyl modified nucleotide
  modified_base 7: mod_base = OTHER; note = 2'-O-methyl modified nucleotide
  modified_base 9: mod_base = OTHER; note = 2'-O-methyl modified nucleotide
  modified_base 12: mod_base = OTHER; note = 2'-O-methyl modified nucleotide
  modified_base 13: mod_base = OTHER; note = 2'-O-methyl modified nucleotide
  modified_base 14: mod_base = OTHER; note = 2'-O-methyl modified nucleotide
  modified_base 15: mod_base = OTHER; note = 2'-O-methyl modified nucleotide
  modified_base 16: mod_base = OTHER; note = 2'-O-methyl modified nucleotide
  modified_base 18: mod_base = OTHER; note = 2'-O-methyl modified nucleotide
aatttctactgttgtagat

SEQ ID NO: 916 - RNA, 19 nt, synthetic construct
  source 1..19: mol_type = other RNA
  modified_base 1: mod_base = OTHER; note = 2'-O-methyl modified nucleotide
  modified_base 4: mod_base = OTHER; note = 2'-O-methyl modified nucleotide
  modified_base 5: mod_base = OTHER; note = 2'-O-methyl modified nucleotide
  modified_base 6: mod_base = OTHER; note = 2'-O-methyl modified nucleotide
  modified_base 7: mod_base = OTHER; note = 2'-O-methyl modified nucleotide
  modified_base 9: mod_base = OTHER; note = 2'-O-methyl modified nucleotide
  modified_base 12: mod_base = OTHER; note = 2'-O-methyl modified nucleotide
  modified_base 13: mod_base = OTHER; note = 2'-O-methyl modified nucleotide
  modified_base 14: mod_base = OTHER; note = 2'-O-methyl modified nucleotide
  modified_base 16: mod_base = OTHER; note = 2'-O-methyl modified nucleotide
  modified_base 18: mod_base = OTHER; note = 2'-O-methyl modified nucleotide
aatttctactgttgtagat

SEQ ID NO: 917 - RNA, 19 nt, synthetic construct
  source 1..19: mol_type = other RNA
  modified_base 4: mod_base = OTHER; note = 2'-O-methyl modified nucleotide
  modified_base 5: mod_base = OTHER; note = 2'-O-methyl modified nucleotide
  modified_base 6: mod_base = OTHER; note = 2'-O-methyl modified nucleotide
  modified_base 7: mod_base = OTHER; note = 2'-O-methyl modified nucleotide
  modified_base 9: mod_base = OTHER; note = 2'-O-methyl modified nucleotide
  modified_base 12: mod_base = OTHER; note = 2'-O-methyl modified nucleotide
  modified_base 13: mod_base = OTHER; note = 2'-O-methyl modified nucleotide
  modified_base 14: mod_base = OTHER; note = 2'-O-methyl modified nucleotide
  modified_base 16: mod_base = OTHER; note = 2'-O-methyl modified nucleotide
  modified_base 18: mod_base = OTHER; note = 2'-O-methyl modified nucleotide
aatttctactgttgtagat

SEQ ID NO: 918 - RNA, 19 nt, synthetic construct
  source 1..19: mol_type = other RNA
  modified_base 4: mod_base = OTHER; note = 2'-O-methyl modified nucleotide
  modified_base 5: mod_base = OTHER; note = 2'-O-methyl modified nucleotide
  modified_base 6: mod_base = OTHER; note = 2'-O-methyl modified nucleotide
  modified_base 9: mod_base = OTHER; note = 2'-O-methyl modified nucleotide
  modified_base 12: mod_base = OTHER; note = 2'-O-methyl modified nucleotide
  modified_base 13: mod_base = OTHER; note = 2'-O-methyl modified nucleotide
  modified_base 14: mod_base = OTHER; note = 2'-O-methyl modified nucleotide
  modified_base 16: mod_base = OTHER; note = 2'-O-methyl modified nucleotide
  modified_base 18: mod_base = OTHER; note = 2'-O-methyl modified nucleotide
aatttctactgttgtagat

SEQ ID NO: 919 - RNA, 19 nt, synthetic construct
  source 1..19: mol_type = other RNA
  modified_base 4: mod_base = OTHER; note = 2'-O-methyl modified nucleotide
  modified_base 5: mod_base = OTHER; note = 2'-O-methyl modified nucleotide
  modified_base 6: mod_base = OTHER; note = 2'-O-methyl modified nucleotide
  modified_base 9: mod_base = OTHER; note = 2'-O-methyl modified nucleotide
  modified_base 12: mod_base = OTHER; note = 2'-O-methyl modified nucleotide
  modified_base 13: mod_base = OTHER; note = 2'-O-methyl modified nucleotide
  modified_base 14: mod_base = OTHER; note = 2'-O-methyl modified nucleotide
  modified_base 16: mod_base = OTHER; note = 2'-O-methyl modified nucleotide
aatttctactgttgtagat

SEQ ID NO: 920 - RNA, 19 nt, synthetic construct
  source 1..19: mol_type = other RNA
  modified_base 4: mod_base = OTHER; note = 2'-O-methyl modified nucleotide
  modified_base 5: mod_base = OTHER; note = 2'-O-methyl modified nucleotide
  modified_base 6: mod_base = OTHER; note = 2'-O-methyl modified nucleotide
  modified_base 9: mod_base = OTHER; note = 2'-O-methyl modified nucleotide
  modified_base 12: mod_base = OTHER; note = 2'-O-methyl modified nucleotide
  modified_base 13: mod_base = OTHER; note = 2'-O-methyl modified nucleotide
  modified_base 16: mod_base = OTHER; note = 2'-O-methyl modified nucleotide
aatttctactgttgtagat

SEQ ID NO: 921 - RNA, 19 nt, synthetic construct
  source 1..19: mol_type = other RNA
  modified_base 4: mod_base = OTHER; note = 2'-O-methyl modified nucleotide
  modified_base 5: mod_base = OTHER; note = 2'-O-methyl modified nucleotide
  modified_base 6: mod_base = OTHER; note = 2'-O-methyl modified nucleotide
  modified_base 12: mod_base = OTHER; note = 2'-O-methyl modified nucleotide
  modified_base 13: mod_base = OTHER; note = 2'-O-methyl modified nucleotide
  modified_base 16: mod_base = OTHER; note = 2'-O-methyl modified nucleotide
aatttctactgttgtagat

SEQ ID NO: 922 - RNA, 19 nt, synthetic construct
  source 1..19: mol_type = other RNA
  modified_base 5: mod_base = OTHER; note = 2'-O-methyl modified nucleotide
  modified_base 6: mod_base = OTHER; note = 2'-O-methyl modified nucleotide
  modified_base 12: mod_base = OTHER; note = 2'-O-methyl modified nucleotide
  modified_base 13: mod_base = OTHER; note = 2'-O-methyl modified nucleotide
  modified_base 16: mod_base = OTHER; note = 2'-O-methyl modified nucleotide
aatttctactgttgtagat

SEQ ID NO: 923 - RNA, 19 nt, synthetic construct
  source 1..19: mol_type = other RNA
  modified_base 5: mod_base = OTHER; note = 2'-O-methyl modified nucleotide
  modified_base 6: mod_base = OTHER; note = 2'-O-methyl modified nucleotide
  modified_base 12: mod_base = OTHER; note = 2'-O-methyl modified nucleotide
  modified_base 13: mod_base = OTHER; note = 2'-O-methyl modified nucleotide
aatttctactgttgtagat

SEQ ID NO: 924 - RNA, 19 nt, synthetic construct
  source 1..19: mol_type = other RNA
  modified_base 5: mod_base = OTHER; note = 2'-O-methyl modified nucleotide
  modified_base 6: mod_base = OTHER; note = 2'-O-methyl modified nucleotide
  modified_base 13: mod_base = OTHER; note = 2'-O-methyl modified nucleotide
aatttctactgttgtagat

SEQ ID NO: 925 - RNA, 19 nt, synthetic construct
  source 1..19: mol_type = other RNA
  modified_base 5: mod_base = OTHER; note = 2'-O-methyl modified nucleotide
  modified_base 13: mod_base = OTHER; note = 2'-O-methyl modified nucleotide
aatttctactgttgtagat

SEQ ID NO: 926 - RNA, 19 nt, synthetic construct
  source 1..19: mol_type = other RNA
aatttctactcttgtagat

SEQ ID NO: 927 - RNA, 40 nt, synthetic construct
  source 1..40: mol_type = other RNA
  misc_difference 4: note = Nucleotide may be 2'-O-methyl modified
  misc_difference 5: note = Nucleotide may be 2'-O-methyl modified
  misc_difference 6: note = Nucleotide may be 2'-O-methyl modified
  misc_difference 7: note = Nucleotide may be 2'-O-methyl modified
  misc_difference 9: note = Nucleotide may be 2'-O-methyl modified
  misc_difference 11: note = Nucleotide may be 2'-O-methyl modified
  misc_difference 12: note = Nucleotide may be 2'-O-methyl modified
  misc_difference 13: note = Nucleotide may be 2'-O-methyl modified
  misc_difference 14: note = Nucleotide may be 2'-O-methyl modified
  misc_difference 16: note = Nucleotide may be 2'-O-methyl modified
  misc_difference 17: note = Nucleotide may be 2'-O-methyl modified
  misc_difference 18: note = Nucleotide may be 2'-O-methyl modified
  misc_difference 20: note = Nucleotide may be 2'-O-methyl modified
  misc_difference 25: note = Nucleotide may be 2'-O-methyl modified
  misc_difference 27: note = Nucleotide may be 2'-O-methyl modified
  misc_difference 28: note = Nucleotide may be 2'-O-methyl modified
  misc_difference 29: note = Nucleotide may be 2'-O-methyl modified
  misc_difference 30: note = Nucleotide may be 2'-O-methyl modified
  misc_difference 31: note = Nucleotide may be 2'-O-methyl modified
  misc_difference 34: note = Nucleotide may be 2'-O-methyl modified
  misc_difference 36: note = Nucleotide may be 2'-O-methyl modified
  misc_difference 38: note = Nucleotide may be 2'-O-methyl modified
  misc_difference 39: note = Nucleotide may be 2'-O-methyl modified
  misc_difference 40: note = Nucleotide may be 2'-O-methyl modified
aatttctactgttgtagatagattaaaaggtaattctatc

SEQ ID NO: 928 - RNA, 40 nt, synthetic construct
  source 1..40: mol_type = other RNA
  misc_difference 4: note = Nucleotide may be 2'-O-methyl modified
  misc_difference 5: note = Nucleotide may be 2'-O-methyl modified
  misc_difference 6: note = Nucleotide may be 2'-O-methyl modified
  misc_difference 7: note = Nucleotide may be 2'-O-methyl modified
  misc_difference 9: note = Nucleotide may be 2'-O-methyl modified
  misc_difference 11: note = Nucleotide may be 2'-O-methyl modified
  misc_difference 12: note = Nucleotide may be 2'-O-methyl modified
  misc_difference 13: note = Nucleotide may be 2'-O-methyl modified
  misc_difference 14: note = Nucleotide may be 2'-O-methyl modified
  misc_difference 16: note = Nucleotide may be 2'-O-methyl modified
  misc_difference 17: note = Nucleotide may be 2'-O-methyl modified
  misc_difference 18: note = Nucleotide may be 2'-O-methyl modified
  misc_difference 20: note = Nucleotide may be 2'-O-methyl modified
  misc_difference 25: note = Nucleotide may be 2'-O-methyl modified
  misc_difference 27: note = Nucleotide may be 2'-O-methyl modified
  misc_difference 28: note = Nucleotide may be 2'-O-methyl modified
  misc_difference 29: note = Nucleotide may be 2'-O-methyl modified
  misc_difference 30: note = Nucleotide may be 2'-O-methyl modified
  misc_difference 31: note = Nucleotide may be 2'-O-methyl modified
  misc_difference 34: note = Nucleotide may be 2'-O-methyl modified
  misc_difference 36: note = Nucleotide may be 2'-O-methyl modified
  misc_difference 38: note = Nucleotide may be 2'-O-methyl modified
  misc_difference 39: note = Nucleotide may be 2'-O-methyl modified
  misc_difference 40: note = Nucleotide may be 2'-O-methyl modified
aatttctactgttgtagatgagaagtcatttaataaggcc

SEQ ID NO: 929 - RNA, 44 nt, synthetic construct; identical to SEQ ID NO: 193
  source 1..44: mol_type = other RNA
  modified_base 1: mod_base = OTHER; note = 2'-O-methyl modified nucleotide with phosphorothioate linkage
  modified_base 2: mod_base = OTHER; note = 2'-O-methyl modified nucleotide
  modified_base 3: mod_base = OTHER; note = 2'-O-methyl modified nucleotide
  modified_base 4: mod_base = OTHER; note = 2'-O-methyl modified nucleotide
  modified_base 5: mod_base = OTHER; note = 2'-O-methyl modified nucleotide
  modified_base 6: mod_base = OTHER; note = 2'-O-methyl modified nucleotide
  modified_base 7: mod_base = OTHER; note = 2'-O-methyl modified nucleotide
  modified_base 8: mod_base = OTHER; note = 2'-O-methyl modified nucleotide
  modified_base 9: mod_base = OTHER; note = 2'-O-methyl modified nucleotide
  modified_base 10: mod_base = OTHER; note = 2'-O-methyl modified nucleotide
  modified_base 11: mod_base = OTHER; note = 2'-O-methyl modified nucleotide
  modified_base 12: mod_base = OTHER; note = 2'-O-methyl modified nucleotide
  modified_base 13: mod_base = OTHER; note = 2'-O-methyl modified nucleotide
  modified_base 14: mod_base = OTHER; note = 2'-O-methyl modified nucleotide
  modified_base 15: mod_base = OTHER; note = 2'-O-methyl modified nucleotide
  modified_base 16: mod_base = OTHER; note = 2'-O-methyl modified nucleotide
  modified_base 17: mod_base = OTHER; note = 2'-O-methyl modified nucleotide
  modified_base 18: mod_base = OTHER; note = 2'-O-methyl modified nucleotide
  modified_base 19: mod_base = OTHER; note = 2'-O-methyl modified nucleotide
  modified_base 20: mod_base = OTHER; note = 2'-O-methyl modified nucleotide
  modified_base 21: mod_base = OTHER; note = 2'-O-methyl modified nucleotide
  modified_base 22: mod_base = OTHER; note = 2'-O-methyl modified nucleotide
  modified_base 23: mod_base = OTHER; note = 2'-O-methyl modified nucleotide
  modified_base 24: mod_base = OTHER; note = 2'-O-methyl modified nucleotide
  modified_base 25: mod_base = OTHER; note = 2'-O-methyl modified nucleotide
  modified_base 26: mod_base = OTHER; note = 2'-O-methyl modified nucleotide
  modified_base 27: mod_base = OTHER; note = 2'-O-methyl modified nucleotide
  modified_base 28: mod_base = OTHER; note = 2'-O-methyl modified nucleotide
  modified_base 29: mod_base = OTHER; note = 2'-O-methyl modified nucleotide
  modified_base 30: mod_base = OTHER; note = 2'-O-methyl modified nucleotide
  modified_base 31: mod_base = OTHER; note = 2'-O-methyl modified nucleotide
  modified_base 32: mod_base = OTHER; note = 2'-O-methyl modified nucleotide
  modified_base 33: mod_base = OTHER; note = 2'-O-methyl modified nucleotide
  modified_base 34: mod_base = OTHER; note = 2'-O-methyl modified nucleotide
  modified_base 35: mod_base = OTHER; note = 2'-O-methyl modified nucleotide
  modified_base 36: mod_base = OTHER; note = 2'-O-methyl modified nucleotide
  modified_base 37: mod_base = OTHER; note = 2'-O-methyl modified nucleotide
  modified_base 38: mod_base = OTHER; note = 2'-O-methyl modified nucleotide
  modified_base 39: mod_base = OTHER; note = 2'-O-methyl modified nucleotide
  modified_base 40: mod_base = OTHER; note = 2'-O-methyl modified nucleotide
  modified_base 41: mod_base = OTHER; note = 2'-O-methyl modified nucleotide
  modified_base 42: mod_base = OTHER; note = 2'-O-methyl modified nucleotide
  modified_base 43: mod_base = OTHER; note = 2'-O-methyl modified nucleotide with phosphorothioate linkage
  modified_base 44: mod_base = OTHER; note = 2'-O-methyl modified nucleotide

SEQ ID NO: 930 - RNA, 44 nt, synthetic construct; identical to SEQ ID NO: 193
  source 1..44: mol_type = other RNA
  modified_base 1: mod_base = OTHER; note = 2'-O-methyl modified nucleotide with phosphorothioate linkage
  modified_base 2: mod_base = OTHER; note = 2'-O-methyl modified nucleotide
  modified_base 3: mod_base = OTHER; note = 2'-O-methyl modified nucleotide
  modified_base 4: mod_base = OTHER; note = 2'-O-methyl modified nucleotide
  modified_base 5: mod_base = OTHER; note = 2'-O-methyl modified nucleotide
  modified_base 6: mod_base = OTHER; note = 2'-O-methyl modified nucleotide
  modified_base 7: mod_base = OTHER; note = 2'-O-methyl modified nucleotide
  modified_base 8: mod_base = OTHER; note = 2'-O-methyl modified nucleotide
  modified_base 9: mod_base = OTHER; note = 2'-O-methyl modified nucleotide
  modified_base 10: mod_base = OTHER; note = 2'-O-methyl modified nucleotide
  modified_base 11: mod_base = OTHER; note = 2'-O-methyl modified nucleotide
  modified_base 12: mod_base = OTHER; note = 2'-O-methyl modified nucleotide
  modified_base 13: mod_base = OTHER; note = 2'-O-methyl modified nucleotide
  modified_base 14: mod_base = OTHER; note = 2'-O-methyl modified nucleotide
  modified_base 15: mod_base = OTHER; note = 2'-O-methyl modified nucleotide
  modified_base 16: mod_base = OTHER; note = 2'-O-methyl modified nucleotide
  modified_base 17: mod_base = OTHER; note = 2'-O-methyl modified nucleotide
  modified_base 18: mod_base = OTHER; note = 2'-O-methyl modified nucleotide
  modified_base 19: mod_base = OTHER; note = 2'-O-methyl modified nucleotide
  modified_base 20: mod_base = OTHER; note = 2'-O-methyl modified nucleotide
  modified_base 21: mod_base = OTHER; note = 2'-O-methyl modified nucleotide
  modified_base 22: mod_base = OTHER; note = 2'-O-methyl modified nucleotide
  modified_base 23: mod_base = OTHER; note = 2'-O-methyl modified nucleotide
  modified_base 24: mod_base = OTHER; note = 2'-O-methyl modified nucleotide
  modified_base 28: mod_base = OTHER; note = 2'-O-methyl modified nucleotide
  modified_base 29: mod_base = OTHER; note = 2'-O-methyl modified nucleotide
  modified_base 30: mod_base = OTHER; note = 2'-O-methyl modified nucleotide
  modified_base 31: mod_base = OTHER; note = 2'-O-methyl modified nucleotide
  modified_base 32: mod_base = OTHER; note = 2'-O-methyl modified nucleotide
  modified_base 33: mod_base = OTHER; note = 2'-O-methyl modified nucleotide
  modified_base 35: mod_base = OTHER; note = 2'-O-methyl modified nucleotide
  modified_base 36: mod_base = OTHER; note = 2'-O-methyl modified nucleotide
  modified_base 38: mod_base = OTHER; note = 2'-O-methyl modified nucleotide
  modified_base 39: mod_base = OTHER; note = 2'-O-methyl modified nucleotide
  modified_base 40: mod_base = OTHER; note = 2'-O-methyl modified nucleotide
  modified_base 41: mod_base = OTHER; note = 2'-O-methyl modified nucleotide
  modified_base 42: mod_base = OTHER; note = 2'-O-methyl modified nucleotide
  modified_base 43: mod_base = OTHER; note = 2'-O-methyl modified nucleotide with phosphorothioate linkage
  modified_base 44: mod_base = OTHER; note = 2'-O-methyl modified nucleotide

SEQ ID NO: 931 - RNA, 44 nt, synthetic construct; identical to SEQ ID NO: 193
  source 1..44: mol_type = other RNA
  modified_base 1: mod_base = OTHER; note = 2'-O-methyl modified nucleotide with phosphorothioate linkage
  modified_base 2: mod_base = OTHER; note = 2'-O-methyl modified nucleotide
  modified_base 6: mod_base = OTHER; note = 2'-O-methyl modified nucleotide
  modified_base 7: mod_base = OTHER; note = 2'-O-methyl modified nucleotide
  modified_base 8: mod_base = OTHER; note = 2'-O-methyl modified nucleotide
  modified_base 9: mod_base = OTHER; note = 2'-O-methyl modified nucleotide
  modified_base 10: mod_base = OTHER; note = 2'-O-methyl modified nucleotide
  modified_base 11: mod_base = OTHER; note = 2'-O-methyl modified nucleotide
  modified_base 13: mod_base = OTHER; note = 2'-O-methyl modified nucleotide
  modified_base 14: mod_base = OTHER; note = 2'-O-methyl modified nucleotide
  modified_base 15: mod_base = OTHER; note = 2'-O-methyl modified nucleotide
  modified_base 17: mod_base = OTHER; note = 2'-O-methyl modified nucleotide
  modified_base 18: mod_base = OTHER; note = 2'-O-methyl modified nucleotide
  modified_base 19: mod_base = OTHER; note = 2'-O-methyl modified nucleotide
  modified_base 20: mod_base = OTHER; note = 2'-O-methyl modified nucleotide
  modified_base 22: mod_base = OTHER; note = 2'-O-methyl modified nucleotide
  modified_base 23: mod_base = OTHER; note = 2'-O-methyl modified nucleotide
  modified_base 24: mod_base = OTHER; note = 2'-O-methyl modified nucleotide
  modified_base 25: mod_base = OTHER; note = 2'-O-methyl modified nucleotide
  modified_base 26: mod_base = OTHER; note = 2'-O-methyl modified nucleotide
  modified_base 27: mod_base = OTHER; note = 2'-O-methyl modified nucleotide
  modified_base 28: mod_base = OTHER; note = 2'-O-methyl modified nucleotide
  modified_base 29: mod_base = OTHER; note = 2'-O-methyl modified nucleotide
  modified_base 30: mod_base = OTHER; note = 2'-O-methyl modified nucleotide
  modified_base 31: mod_base = OTHER; note = 2'-O-methyl modified nucleotide
  modified_base 32: mod_base = OTHER; note = 2'-O-methyl modified nucleotide
  modified_base 33: mod_base = OTHER; note = 2'-O-methyl modified nucleotide
  modified_base 34: mod_base = OTHER; note = 2'-O-methyl modified nucleotide
  modified_base 35: mod_base = OTHER; note = 2'-O-methyl modified nucleotide
  modified_base 36: mod_base = OTHER; note = 2'-O-methyl modified nucleotide
  modified_base 37: mod_base = OTHER; note = 2'-O-methyl modified nucleotide
  modified_base 38: mod_base = OTHER; note = 2'-O-methyl modified nucleotide
  modified_base 39: mod_base = OTHER; note = 2'-O-methyl modified nucleotide
  modified_base 40: mod_base = OTHER; note = 2'-O-methyl modified nucleotide
  modified_base 41: mod_base = OTHER; note = 2'-O-methyl modified nucleotide
  modified_base 42: mod_base = OTHER; note = 2'-O-methyl modified nucleotide
  modified_base 43: mod_base = OTHER; note = 2'-O-methyl modified nucleotide with phosphorothioate linkage
  modified_base 44: mod_base = OTHER; note = 2'-O-methyl modified nucleotide

SEQ ID NO: 932 - RNA, 44 nt, synthetic construct; identical to SEQ ID NO: 193
  source 1..44: mol_type = other RNA
  modified_base 1: mod_base = OTHER; note = 2'-O-methyl modified nucleotide with phosphorothioate linkage
  modified_base 2: mod_base = OTHER; note = 2'-O-methyl modified nucleotide
  modified_base 6: mod_base = OTHER; note = 2'-O-methyl modified nucleotide
  modified_base 7: mod_base = OTHER; note = 2'-O-methyl modified nucleotide
  modified_base 8: mod_base = OTHER; note = 2'-O-methyl modified nucleotide
  modified_base 9: mod_base = OTHER; note = 2'-O-methyl modified nucleotide
  modified_base 10: mod_base = OTHER; note = 2'-O-methyl modified nucleotide
  modified_base 11: mod_base = OTHER; note = 2'-O-methyl modified nucleotide
  modified_base 13: mod_base = OTHER; note = 2'-O-methyl modified nucleotide
  modified_base 14: mod_base = OTHER; note = 2'-O-methyl modified nucleotide
  modified_base 15: mod_base = OTHER; note = 2'-O-methyl modified nucleotide
  modified_base 17: mod_base = OTHER; note = 2'-O-methyl modified nucleotide
  modified_base 18: mod_base = OTHER; note = 2'-O-methyl modified nucleotide
  modified_base 19: mod_base = OTHER; note = 2'-O-methyl modified nucleotide
  modified_base 20: mod_base = OTHER; note = 2'-O-methyl modified nucleotide
  modified_base 22: mod_base = OTHER; note = 2'-O-methyl modified nucleotide
  modified_base 23: mod_base = OTHER; note = 2'-O-methyl modified nucleotide
  modified_base 24: mod_base = OTHER; note = 2'-O-methyl modified nucleotide
  modified_base 28: mod_base = OTHER; note = 2'-O-methyl modified nucleotide
  modified_base 29: mod_base = OTHER; note = 2'-O-methyl modified nucleotide
  modified_base 30: mod_base = OTHER; note = 2'-O-methyl modified nucleotide
  modified_base 31: mod_base = OTHER; note = 2'-O-methyl modified nucleotide
  modified_base 32: mod_base = OTHER; note = 2'-O-methyl modified nucleotide
  modified_base 33: mod_base = OTHER; note = 2'-O-methyl modified nucleotide
  modified_base 35: mod_base = OTHER; note = 2'-O-methyl modified nucleotide
  modified_base 36: mod_base = OTHER; note = 2'-O-methyl modified nucleotide
  modified_base 38: mod_base = OTHER; note = 2'-O-methyl modified nucleotide
  modified_base 39: mod_base = OTHER; note = 2'-O-methyl modified nucleotide
  modified_base 40: mod_base = OTHER; note = 2'-O-methyl modified nucleotide
  modified_base 41: mod_base = OTHER; note = 2'-O-methyl modified nucleotide
  modified_base 42: mod_base = OTHER; note = 2'-O-methyl modified nucleotide
  modified_base 43: mod_base = OTHER; note = 2'-O-methyl modified nucleotide with phosphorothioate linkage
  modified_base 44: mod_base = OTHER; note = 2'-O-methyl modified nucleotide

SEQ ID NO: 933 - RNA, 44 nt, synthetic construct; identical to SEQ ID NO: 193
  source 1..44: mol_type = other RNA
  modified_base 1: mod_base = OTHER; note = 2'-O-methyl modified nucleotide with phosphorothioate linkage
  modified_base 2: mod_base = OTHER; note = 2'-O-methyl modified nucleotide
  modified_base 6: mod_base = OTHER; note = 2'-O-methyl modified nucleotide
  modified_base 7: mod_base = OTHER; note = 2'-O-methyl modified nucleotide
  modified_base 10: mod_base = OTHER; note = 2'-O-methyl modified nucleotide
  modified_base 11: mod_base = OTHER; note = 2'-O-methyl modified nucleotide
  modified_base 13: mod_base = OTHER; note = 2'-O-methyl modified nucleotide
  modified_base 14: mod_base = OTHER; note = 2'-O-methyl modified nucleotide
  modified_base 15: mod_base = OTHER; note = 2'-O-methyl modified nucleotide
  modified_base 17: mod_base = OTHER; note = 2'-O-methyl modified nucleotide
  modified_base 18: mod_base = OTHER; note = 2'-O-methyl modified nucleotide
  modified_base 19: mod_base = OTHER; note = 2'-O-methyl modified nucleotide
  modified_base 20: mod_base = OTHER; note = 2'-O-methyl modified nucleotide
  modified_base 22: mod_base = OTHER; note = 2'-O-methyl modified nucleotide
  modified_base 23: mod_base = OTHER; note = 2'-O-methyl modified nucleotide
  modified_base 24: mod_base = OTHER; note = 2'-O-methyl modified nucleotide
  modified_base 29: mod_base = OTHER; note = 2'-O-methyl modified nucleotide
  modified_base 30: mod_base = OTHER; note = 2'-O-methyl modified nucleotide
  modified_base 31: mod_base = OTHER; note = 2'-O-methyl modified nucleotide
  modified_base 33: mod_base = OTHER; note = 2'-O-methyl modified nucleotide
  modified_base 35: mod_base = OTHER; note = 2'-O-methyl modified nucleotide
  modified_base 36: mod_base = OTHER; note = 2'-O-methyl modified nucleotide
  modified_base 40: mod_base = OTHER; note = 2'-O-methyl modified nucleotide
  modified_base 41: mod_base = OTHER; note = 2'-O-methyl modified nucleotide
  modified_base 42: mod_base = OTHER; note = 2'-O-methyl modified nucleotide
  modified_base 43: mod_base = OTHER; note = 2'-O-methyl modified nucleotide with phosphorothioate linkage
  modified_base 44: mod_base = OTHER; note = 2'-O-methyl modified nucleotide

SEQ ID NO: 934 - RNA, 44 nt, synthetic construct; identical to SEQ ID NO: 193
  source 1..44: mol_type = other RNA
  modified_base 1: mod_base = OTHER; note = 2'-O-methyl modified nucleotide with phosphorothioate linkage
  modified_base 2: mod_base = OTHER; note = 2'-O-methyl modified nucleotide
  modified_base 6: mod_base = OTHER; note = 2'-O-methyl modified nucleotide
  modified_base 7: mod_base = OTHER; note = 2'-O-methyl modified nucleotide
  modified_base 10: mod_base = OTHER; note = 2'-O-methyl modified nucleotide
  modified_base 11: mod_base = OTHER; note = 2'-O-methyl modified nucleotide
  modified_base 13: mod_base = OTHER; note = 2'-O-methyl modified nucleotide
  modified_base 14: mod_base = OTHER; note = 2'-O-methyl modified nucleotide
  modified_base 15: mod_base = OTHER; note = 2'-O-methyl modified nucleotide
  modified_base 17: mod_base = OTHER; note = 2'-O-methyl modified nucleotide
  modified_base 18: mod_base = OTHER; note = 2'-O-methyl modified nucleotide
  modified_base 19: mod_base = OTHER; note = 2'-O-methyl modified nucleotide
  modified_base 20: mod_base = OTHER; note = 2'-O-methyl modified nucleotide
  modified_base 22: mod_base = OTHER; note = 2'-O-methyl modified nucleotide
  modified_base 29: mod_base = OTHER; note = 2'-O-methyl modified nucleotide
  modified_base 30: mod_base = OTHER; note = 2'-O-methyl modified nucleotide
  modified_base 31: mod_base = OTHER; note = 2'-O-methyl modified nucleotide
  modified_base 33: mod_base = OTHER; note = 2'-O-methyl modified nucleotide
  modified_base 40: mod_base = OTHER; note = 2'-O-methyl modified nucleotide
  modified_base 41: mod_base = OTHER; note = 2'-O-methyl modified nucleotide
  modified_base 42: mod_base = OTHER; note = 2'-O-methyl modified nucleotide
  modified_base 43: mod_base = OTHER; note = 2'-O-methyl modified nucleotide with phosphorothioate linkage
  modified_base 44: mod_base = OTHER; note = 2'-O-methyl modified nucleotide

SEQ ID NO: 935 - RNA, 46 nt, synthetic construct; identical to SEQ ID NO: 199
  source 1..46: mol_type = other RNA
  modified_base 1: mod_base = OTHER; note = 2'-O-methyl modified nucleotide with phosphorothioate linkage
  modified_base 2: mod_base = OTHER; note = 2'-O-methyl modified nucleotide
  modified_base 8: mod_base = OTHER; note = 2'-O-methyl modified nucleotide
  modified_base 9: mod_base = OTHER; note = 2'-O-methyl modified nucleotide
  modified_base 13: mod_base = OTHER; note = 2'-O-methyl modified nucleotide
  modified_base 15: mod_base = OTHER; note = 2'-O-methyl modified nucleotide
  modified_base 16: mod_base = OTHER; note = 2'-O-methyl modified nucleotide
  modified_base 17: mod_base = OTHER; note = 2'-O-methyl modified nucleotide
  modified_base 20: mod_base = OTHER; note = 2'-O-methyl modified nucleotide
  modified_base 21: mod_base = OTHER; note = 2'-O-methyl modified nucleotide
  modified_base 22: mod_base = OTHER; note = 2'-O-methyl modified nucleotide
  modified_base 24: mod_base = OTHER; note = 2'-O-methyl modified nucleotide
  modified_base 31: mod_base = OTHER; note = 2'-O-methyl modified nucleotide
  modified_base 32: mod_base = OTHER; note = 2'-O-methyl modified nucleotide
  modified_base 33: mod_base = OTHER; note = 2'-O-methyl modified nucleotide
  modified_base 35: mod_base = OTHER; note = 2'-O-methyl modified nucleotide
  modified_base 42: mod_base = OTHER; note = 2'-O-methyl modified nucleotide
  modified_base 43: mod_base = OTHER; note = 2'-O-methyl modified nucleotide
  modified_base 44: mod_base = OTHER; note = 2'-O-methyl modified nucleotide
  modified_base 45: mod_base = OTHER; note = 2'-O-methyl modified nucleotide with phosphorothioate linkage
  modified_base 46: mod_base = OTHER; note = 2'-O-methyl modified nucleotide

SEQ ID NO: 936 - RNA, 41 nt, synthetic construct; identical to SEQ ID NO: 200
  source 1..41: mol_type = other RNA
  modified_base 1: mod_base = OTHER; note = 2'-O-methyl modified nucleotide with phosphorothioate linkage
  modified_base 2: mod_base = OTHER; note = 2'-O-methyl modified nucleotide
  modified_base 3: mod_base = OTHER; note = 2'-O-methyl modified nucleotide
  modified_base 4: mod_base = OTHER; note = 2'-O-methyl modified nucleotide
  modified_base 5: mod_base = OTHER; note = 2'-O-methyl modified nucleotide
  modified_base 6: mod_base = OTHER; note = 2'-O-methyl modified nucleotide
  modified_base 7: mod_base = OTHER; note = 2'-O-methyl modified nucleotide
  modified_base 8: mod_base = OTHER; note = 2'-O-methyl modified nucleotide
  modified_base 9: mod_base = OTHER; note = 2'-O-methyl modified nucleotide
  modified_base 10: mod_base = OTHER; note = 2'-O-methyl modified nucleotide
  modified_base 11: mod_base = OTHER; note = 2'-O-methyl modified nucleotide
  modified_base 12: mod_base = OTHER; note = 2'-O-methyl modified nucleotide
  modified_base 13: mod_base = OTHER; note = 2'-O-methyl modified nucleotide
  modified_base 14: mod_base = OTHER; note = 2'-O-methyl modified nucleotide
  modified_base 15: mod_base = OTHER; note = 2'-O-methyl modified nucleotide
  modified_base 16: mod_base = OTHER; note = 2'-O-methyl modified nucleotide
  modified_base 17: mod_base = OTHER; note = 2'-O-methyl modified nucleotide
  modified_base 18: mod_base = OTHER; note = 2'-O-methyl modified nucleotide
  modified_base 19: mod_base = OTHER; note = 2'-O-methyl modified nucleotide
  modified_base 20: mod_base = OTHER; note = 2'-O-methyl modified nucleotide
  modified_base 21: mod_base = OTHER; note = 2'-O-methyl modified nucleotide
  modified_base 22: mod_base = OTHER; note = 2'-O-methyl modified nucleotide
  modified_base 23: mod_base = OTHER; note = 2'-O-methyl modified nucleotide
  modified_base 24: mod_base = OTHER; note = 2'-O-methyl modified nucleotide
  modified_base 25: mod_base = OTHER; note = 2'-O-methyl modified nucleotide
  modified_base 26: mod_base = OTHER; note = 2'-O-methyl modified nucleotide
  modified_base 27: mod_base = OTHER; note = 2'-O-methyl modified nucleotide
  modified_base 28: mod_base = OTHER; note = 2'-O-methyl modified nucleotide
  modified_base 29: mod_base = OTHER; note = 2'-O-methyl modified nucleotide
  modified_base 30: mod_base = OTHER; note = 2'-O-methyl modified nucleotide
  modified_base 31: mod_base = OTHER; note = 2'-O-methyl modified nucleotide
  modified_base 32: mod_base = OTHER; note = 2'-O-methyl modified nucleotide
  modified_base 33: mod_base = OTHER; note = 2'-O-methyl modified nucleotide
  modified_base 34: mod_base = OTHER; note = 2'-O-methyl modified nucleotide
  modified_base 35: mod_base = OTHER; note = 2'-O-methyl modified nucleotide
  modified_base 36: mod_base = OTHER; note = 2'-O-methyl modified nucleotide
  modified_base 37: mod_base = OTHER; note = 2'-O-methyl modified nucleotide
  modified_base 38: mod_base = OTHER; note = 2'-O-methyl modified nucleotide
  modified_base 39: mod_base = OTHER; note = 2'-O-methyl modified nucleotide
  modified_base 40: mod_base = OTHER; note = 2'-O-methyl modified nucleotide with phosphorothioate linkage
  modified_base 41: mod_base = OTHER; note = 2'-O-methyl modified nucleotide

SEQ ID NO: 937 - RNA, 41 nt, synthetic construct; identical to SEQ ID NO: 200
  source 1..41: mol_type = other RNA
  modified_base 1: mod_base = OTHER; note = 2'-O-methyl modified nucleotide with phosphorothioate linkage
  modified_base 2: mod_base = OTHER; note = 2'-O-methyl modified nucleotide
  modified_base 3: mod_base = OTHER; note = 2'-O-methyl modified nucleotide
  modified_base 4: mod_base = OTHER; note = 2'-O-methyl modified nucleotide
  modified_base 5: mod_base = OTHER; note = 2'-O-methyl modified nucleotide
  modified_base 6: mod_base = OTHER; note = 2'-O-methyl modified nucleotide
  modified_base 7: mod_base = OTHER; note = 2'-O-methyl modified nucleotide
  modified_base 8: mod_base = OTHER; note = 2'-O-methyl modified nucleotide
  modified_base 9: mod_base = OTHER; note = 2'-O-methyl modified nucleotide
  modified_base 10: mod_base = OTHER; note = 2'-O-methyl modified nucleotide
  modified_base 11: mod_base = OTHER; note = 2'-O-methyl modified nucleotide
  modified_base 12: mod_base = OTHER; note = 2'-O-methyl modified nucleotide
  modified_base 13: mod_base = OTHER; note = 2'-O-methyl modified nucleotide
  modified_base 14: mod_base = OTHER; note = 2'-O-methyl modified nucleotide
  modified_base 15: mod_base = OTHER; note = 2'-O-methyl modified nucleotide
  modified_base 16: mod_base = OTHER; note = 2'-O-methyl modified nucleotide
  modified_base 17: mod_base = OTHER; note = 2'-O-methyl modified nucleotide
  modified_base 18: mod_base = OTHER; note = 2'-O-methyl modified nucleotide
  modified_base 19: mod_base = OTHER; note = 2'-O-methyl modified nucleotide
  modified_base 20: mod_base = OTHER; note = 2'-O-methyl modified nucleotide
  modified_base 21: mod_base = OTHER; note = 2'-O-methyl modified nucleotide
  modified_base 22: mod_base = OTHER; note = 2'-O-methyl modified nucleotide
  modified_base 23: mod_base = OTHER; note = 2'-O-methyl modified nucleotide
  modified_base 24: mod_base = OTHER; note = 2'-O-methyl modified nucleotide
  modified_base 28: mod_base = OTHER; note = 2'-O-methyl modified nucleotide
  modified_base 29: mod_base = OTHER; note = 2'-O-methyl modified nucleotide
  modified_base 30: mod_base = OTHER; note = 2'-O-methyl modified nucleotide
  modified_base 31: mod_base = OTHER; note = 2'-O-methyl modified nucleotide
  modified_base 32: mod_base = OTHER; note = 2'-O-methyl modified nucleotide
  modified_base 33: mod_base = OTHER; note = 2'-O-methyl modified nucleotide
  modified_base 35: mod_base = OTHER; note = 2'-O-methyl modified nucleotide
  modified_base 36: mod_base = OTHER; note = 2'-O-methyl modified nucleotide
  modified_base 38: mod_base = OTHER; note = 2'-O-methyl modified nucleotide
  modified_base 39: mod_base = OTHER; note = 2'-O-methyl modified nucleotide
  modified_base 40: mod_base = OTHER; note = 2'-O-methyl modified nucleotide with phosphorothioate linkage
  modified_base 41: mod_base = OTHER; note = 2'-O-methyl modified nucleotide

SEQ ID NO: 938 - RNA, 41 nt, synthetic construct; identical to SEQ ID NO: 200
  source 1..41: mol_type = other RNA
  modified_base 1: mod_base = OTHER; note = 2'-O-methyl modified nucleotide with phosphorothioate linkage
  modified_base 2: mod_base = OTHER; note = 2'-O-methyl modified nucleotide
  modified_base 6: mod_base = OTHER; note = 2'-O-methyl modified nucleotide
  modified_base 7: mod_base = OTHER; note = 2'-O-methyl modified nucleotide
  modified_base 8: mod_base = OTHER; note = 2'-O-methyl modified nucleotide
  modified_base 9: mod_base = OTHER; note = 2'-O-methyl modified nucleotide
  modified_base 10: mod_base = OTHER; note = 2'-O-methyl modified nucleotide
  modified_base 11: mod_base = OTHER; note = 2'-O-methyl modified nucleotide
  modified_base 13: mod_base = OTHER; note = 2'-O-methyl modified nucleotide
  modified_base 14: mod_base = OTHER; note = 2'-O-methyl modified nucleotide
  modified_base 15: mod_base = OTHER; note = 2'-O-methyl modified nucleotide
  modified_base 17: mod_base = OTHER; note = 2'-O-methyl modified nucleotide
  modified_base 18: mod_base = OTHER; note = 2'-O-methyl modified nucleotide
  modified_base 19: mod_base = OTHER; note = 2'-O-methyl modified nucleotide
  modified_base 20: mod_base = OTHER; note = 2'-O-methyl modified nucleotide
  modified_base 22: mod_base = OTHER; note = 2'-O-methyl modified nucleotide
  modified_base 23: mod_base = OTHER; note = 2'-O-methyl modified nucleotide
  modified_base 24: mod_base = OTHER; note = 2'-O-methyl modified nucleotide
  modified_base 25: mod_base = OTHER; note = 2'-O-methyl modified nucleotide
  modified_base 26: mod_base = OTHER; note = 2'-O-methyl modified nucleotide
  modified_base 27: mod_base = OTHER; note = 2'-O-methyl modified nucleotide
  modified_base 28: mod_base = OTHER; note = 2'-O-methyl modified nucleotide
  modified_base 29: mod_base = OTHER; note = 2'-O-methyl modified nucleotide
  modified_base 30: mod_base = OTHER; note = 2'-O-methyl modified nucleotide
  modified_base 31: mod_base = OTHER; note = 2'-O-methyl modified nucleotide
  modified_base 32: mod_base = OTHER; note = 2'-O-methyl modified nucleotide
  modified_base 33: mod_base = OTHER; note = 2'-O-methyl modified nucleotide
  modified_base 34: mod_base = OTHER; note = 2'-O-methyl modified nucleotide
  modified_base 35: mod_base = OTHER; note = 2'-O-methyl modified nucleotide
  modified_base 36: mod_base = OTHER; note = 2'-O-methyl modified nucleotide
  modified_base 37: mod_base = OTHER; note = 2'-O-methyl modified nucleotide
  modified_base 38: mod_base = OTHER; note = 2'-O-methyl modified nucleotide
  modified_base 39: mod_base = OTHER; note = 2'-O-methyl modified nucleotide
  modified_base 40: mod_base = OTHER; note = 2'-O-methyl modified nucleotide with phosphorothioate linkage
  modified_base 41: mod_base = OTHER; note = 2'-O-methyl modified nucleotide

SEQ ID NO: 939 - RNA, 41 nt, synthetic construct; identical to SEQ ID NO: 200
  source 1..41: mol_type = other RNA
  modified_base 1: mod_base = OTHER; note = 2'-O-methyl modified nucleotide with phosphorothioate linkage
  modified_base 2: mod_base = OTHER; note = 2'-O-methyl modified nucleotide
  modified_base 6: mod_base = OTHER; note = 2'-O-methyl modified nucleotide
  modified_base 7: mod_base = OTHER; note = 2'-O-methyl modified nucleotide
  modified_base 8: mod_base = OTHER; note = 2'-O-methyl modified nucleotide
  modified_base 9: mod_base = OTHER; note = 2'-O-methyl modified nucleotide
  modified_base 10: mod_base = OTHER; note = 2'-O-methyl modified nucleotide
  modified_base 11: mod_base = OTHER; note = 2'-O-methyl modified nucleotide
  modified_base 13: mod_base = OTHER; note = 2'-O-methyl modified nucleotide
  modified_base 14: mod_base = OTHER; note = 2'-O-methyl modified nucleotide
  modified_base 15: mod_base = OTHER; note = 2'-O-methyl modified nucleotide
  modified_base 17: mod_base = OTHER; note = 2'-O-methyl modified nucleotide
  modified_base 18: mod_base = OTHER; note = 2'-O-methyl modified nucleotide
  modified_base 19: mod_base = OTHER; note = 2'-O-methyl modified nucleotide
  modified_base 20: mod_base = OTHER; note = 2'-O-methyl modified nucleotide
  modified_base 22: mod_base = OTHER; note = 2'-O-methyl modified nucleotide
  modified_base 23: mod_base = OTHER; note = 2'-O-methyl modified nucleotide
  modified_base 24: mod_base = OTHER; note = 2'-O-methyl modified nucleotide
  modified_base 28: mod_base = OTHER; note = 2'-O-methyl modified nucleotide
  modified_base 29: mod_base = OTHER; note = 2'-O-methyl modified nucleotide
  modified_base 30: mod_base = OTHER; note = 2'-O-methyl modified nucleotide
  modified_base 31: mod_base = OTHER; note = 2'-O-methyl modified nucleotide
  modified_base 32: mod_base = OTHER; note = 2'-O-methyl modified nucleotide
  modified_base 33: mod_base = OTHER; note = 2'-O-methyl modified nucleotide
  modified_base 35: mod_base = OTHER; note = 2'-O-methyl modified nucleotide
  modified_base 36: mod_base = OTHER; note = 2'-O-methyl modified nucleotide
  modified_base 38: mod_base = OTHER; note = 2'-O-methyl modified nucleotide
  modified_base 39: mod_base = OTHER; note = 2'-O-methyl modified nucleotide
  modified_base 40: mod_base = OTHER; note = 2'-O-methyl modified nucleotide with phosphorothioate linkage
  modified_base 41: mod_base = OTHER; note = 2'-O-methyl modified nucleotide

SEQ ID NO: 940 - RNA, 41 nt, synthetic construct; identical to SEQ ID NO: 200
  source 1..41: mol_type = other RNA
  modified_base 1: mod_base = OTHER; note = 2'-O-methyl modified nucleotide with phosphorothioate linkage
  modified_base 2: mod_base = OTHER; note = 2'-O-methyl modified nucleotide
  modified_base 6: mod_base = OTHER; note = 2'-O-methyl modified nucleotide
  modified_base 7: mod_base = OTHER; note = 2'-O-methyl modified nucleotide
  modified_base 10: mod_base = OTHER; note = 2'-O-methyl modified nucleotide
  modified_base 11: mod_base = OTHER; note = 2'-O-methyl modified nucleotide
  modified_base 13: mod_base = OTHER; note = 2'-O-methyl modified nucleotide
  modified_base 14: mod_base = OTHER; note = 2'-O-methyl modified nucleotide
  modified_base 15: mod_base = OTHER; note = 2'-O-methyl modified nucleotide
  modified_base 17: mod_base = OTHER; note = 2'-O-methyl modified nucleotide
  modified_base 18: mod_base = OTHER; note = 2'-O-methyl modified nucleotide
  modified_base 19: mod_base = OTHER; note = 2'-O-methyl modified nucleotide
  modified_base 20: mod_base = OTHER; note = 2'-O-methyl modified nucleotide
  modified_base 22: mod_base = OTHER; note = 2'-O-methyl modified nucleotide
  modified_base 23: mod_base = OTHER; note = 2'-O-methyl modified nucleotide
  modified_base 24: mod_base = OTHER; note = 2'-O-methyl modified nucleotide
  modified_base 29: mod_base = OTHER; note = 2'-O-methyl modified nucleotide
  modified_base 30: mod_base = OTHER; note = 2'-O-methyl modified nucleotide
  modified_base 31: mod_base = OTHER; note = 2'-O-methyl modified nucleotide
  modified_base 33: mod_base = OTHER; note = 2'-O-methyl modified nucleotide
  modified_base 35: mod_base = OTHER; note = 2'-O-methyl modified nucleotide
  modified_base 36: mod_base = OTHER; note = 2'-O-methyl modified nucleotide
  modified_base 40: mod_base = OTHER; note = 2'-O-methyl modified nucleotide with phosphorothioate linkage
  modified_base 41: mod_base = OTHER; note = 2'-O-methyl modified nucleotide

SEQ ID NO: 941 - RNA, 41 nt, synthetic construct; identical to SEQ ID NO: 200
  source 1..41: mol_type = other RNA
  modified_base 1: mod_base = OTHER; note = 2'-O-methyl modified nucleotide with phosphorothioate linkage
  modified_base 2: mod_base = OTHER; note = 2'-O-methyl modified nucleotide
  modified_base 6: mod_base = OTHER; note = 2'-O-methyl modified nucleotide
  modified_base 7: mod_base = OTHER; note = 2'-O-methyl modified nucleotide
  modified_base 10: mod_base = OTHER; note = 2'-O-methyl modified nucleotide
  modified_base 11: mod_base = OTHER; note = 2'-O-methyl modified nucleotide
  modified_base 13: mod_base = OTHER; note = 2'-O-methyl modified nucleotide
  modified_base 14: mod_base = OTHER; note = 2'-O-methyl modified nucleotide
  modified_base 15: mod_base = OTHER; note = 2'-O-methyl modified nucleotide
  modified_base 17: mod_base = OTHER; note = 2'-O-methyl modified nucleotide
  modified_base 18: mod_base = OTHER; note = 2'-O-methyl modified nucleotide
  modified_base 19: mod_base = OTHER; note = 2'-O-methyl modified nucleotide
  modified_base 20: mod_base = OTHER; note = 2'-O-methyl modified nucleotide
  modified_base 22: mod_base = OTHER; note = 2'-O-methyl modified nucleotide
  modified_base 29: mod_base = OTHER; note = 2'-O-methyl modified nucleotide
  modified_base 30: mod_base = OTHER; note = 2'-O-methyl modified nucleotide
  modified_base 31: mod_base = OTHER; note = 2'-O-methyl modified nucleotide
  modified_base 33: mod_base = OTHER; note = 2'-O-methyl modified nucleotide
  modified_base 40: mod_base = OTHER; note = 2'-O-methyl modified nucleotide with phosphorothioate linkage
  modified_base 41: mod_base = OTHER; note = 2'-O-methyl modified nucleotide

SEQ ID NO: 942 - RNA, 43 nt, synthetic construct; identical to SEQ ID NO: 206
  source 1..43: mol_type = other RNA
  modified_base 1: mod_base = OTHER; note = 2'-O-methyl modified nucleotide with phosphorothioate linkage
  modified_base 2: mod_base = OTHER; note = 2'-O-methyl modified nucleotide
  modified_base 8: mod_base = OTHER; note = 2'-O-methyl modified nucleotide
  modified_base 9: mod_base = OTHER; note = 2'-O-methyl modified nucleotide
  modified_base 13: mod_base = OTHER; note = 2'-O-methyl modified nucleotide
  modified_base 15: mod_base = OTHER; note = 2'-O-methyl modified nucleotide
  modified_base 16: mod_base = OTHER; note = 2'-O-methyl modified nucleotide
  modified_base 17: mod_base = OTHER; note = 2'-O-methyl modified nucleotide
  modified_base 20: mod_base = OTHER; note = 2'-O-methyl modified nucleotide
  modified_base 21: mod_base = OTHER; note = 2'-O-methyl modified nucleotide
  modified_base 22: mod_base = OTHER; note = 2'-O-methyl modified nucleotide
  modified_base 24: mod_base = OTHER; note = 2'-O-methyl modified nucleotide
  modified_base 31: mod_base = OTHER; note = 2'-O-methyl modified nucleotide
  modified_base 32: mod_base = OTHER; note = 2'-O-methyl modified nucleotide
  modified_base 33: mod_base = OTHER; note = 2'-O-methyl modified nucleotide
  modified_base 35: mod_base = OTHER; note = 2'-O-methyl modified nucleotide
  modified_base 42: mod_base = OTHER; note = 2'-O-methyl modified nucleotide with phosphorothioate linkage
  modified_base 43: mod_base = OTHER; note = 2'-O-methyl modified nucleotide

SEQ ID NO: 943 - RNA, 42 nt, synthetic construct; identical to SEQ ID NO: 207
  source 1..42: mol_type = other RNA
  modified_base 1: mod_base = OTHER; note = 2'-O-methyl modified nucleotide with phosphorothioate linkage
  modified_base 2: mod_base = OTHER; note = 2'-O-methyl modified nucleotide
  modified_base 3: mod_base = OTHER; note = 2'-O-methyl modified nucleotide
  modified_base 4: mod_base = OTHER; note = 2'-O-methyl modified nucleotide
  modified_base 5: mod_base = OTHER; note = 2'-O-methyl modified nucleotide
  modified_base 6: mod_base = OTHER; note = 2'-O-methyl modified nucleotide
  modified_base 7: mod_base = OTHER; note = 2'-O-methyl modified nucleotide
  modified_base 8: mod_base = OTHER; note = 2'-O-methyl modified nucleotide
  modified_base 9: mod_base = OTHER; note = 2'-O-methyl modified nucleotide
  modified_base 10: mod_base = OTHER; note = 2'-O-methyl modified nucleotide
  modified_base 11: mod_base = OTHER; note = 2'-O-methyl modified nucleotide
  modified_base 12: mod_base = OTHER; note = 2'-O-methyl modified nucleotide
  modified_base 13: mod_base = OTHER; note = 2'-O-methyl modified nucleotide
  modified_base 14: mod_base = OTHER; note = 2'-O-methyl modified nucleotide
  modified_base 15: mod_base = OTHER; note = 2'-O-methyl modified nucleotide
  modified_base 16: mod_base = OTHER; note = 2'-O-methyl modified nucleotide
  modified_base 17: mod_base = OTHER; note = 2'-O-methyl modified nucleotide
  modified_base 18: mod_base = OTHER; note = 2'-O-methyl modified nucleotide
  modified_base 19: mod_base = OTHER; note = 2'-O-methyl modified nucleotide
  modified_base 20: mod_base = OTHER; note = 2'-O-methyl modified nucleotide
  modified_base 21: mod_base = OTHER; note = 2'-O-methyl modified nucleotide
  modified_base 22: mod_base = OTHER; note = 2'-O-methyl modified nucleotide
  modified_base 23: mod_base = OTHER; note = 2'-O-methyl modified nucleotide
  modified_base 24: mod_base = OTHER; note = 2'-O-methyl modified nucleotide
  modified_base 25: mod_base = OTHER; note = 2'-O-methyl modified nucleotide
  modified_base 26: mod_base = OTHER; note = 2'-O-methyl modified nucleotide
  modified_base 27: mod_base = OTHER; note = 2'-O-methyl modified nucleotide
  modified_base 28: mod_base = OTHER; note = 2'-O-methyl modified nucleotide
  modified_base 29: mod_base = OTHER; note = 2'-O-methyl modified nucleotide
  modified_base 30: mod_base = OTHER; note = 2'-O-methyl modified nucleotide
  modified_base 31: mod_base = OTHER; note = 2'-O-methyl modified nucleotide
  modified_base 32: mod_base = OTHER; note = 2'-O-methyl modified nucleotide
  modified_base 33: mod_base = OTHER; note = 2'-O-methyl modified nucleotide
  modified_base 34: mod_base = OTHER; note = 2'-O-methyl modified nucleotide
  modified_base 35: mod_base = OTHER; note = 2'-O-methyl modified nucleotide
  modified_base 36: mod_base = OTHER; note = 2'-O-methyl modified nucleotide
  modified_base 37: mod_base = OTHER; note = 2'-O-methyl modified nucleotide
  modified_base 38: mod_base = OTHER; note = 2'-O-methyl modified nucleotide
  modified_base 39: mod_base = OTHER; note = 2'-O-methyl modified nucleotide
  modified_base 40: mod_base = OTHER; note = 2'-O-methyl modified nucleotide
  modified_base 41: mod_base = OTHER; note = 2'-O-methyl modified nucleotide with phosphorothioate linkage
  modified_base 42: mod_base = OTHER; note = 2'-O-methyl modified nucleotide

SEQ ID NO: 944 - RNA, 42 nt, synthetic construct; identical to SEQ ID NO: 207
  source 1..42: mol_type = other RNA
  modified_base 1: mod_base = OTHER; note = 2'-O-methyl modified nucleotide with phosphorothioate linkage
  modified_base 2: mod_base = OTHER; note = 2'-O-methyl modified nucleotide
  modified_base 3: mod_base = OTHER; note = 2'-O-methyl modified nucleotide
  modified_base 4: mod_base = OTHER; note = 2'-O-methyl modified nucleotide
  modified_base 5: mod_base = OTHER; note = 2'-O-methyl modified nucleotide
  modified_base 6: mod_base = OTHER; note = 2'-O-methyl modified nucleotide
  modified_base 7: mod_base = OTHER; note = 2'-O-methyl modified nucleotide
  modified_base 8: mod_base = OTHER; note = 2'-O-methyl modified nucleotide
  modified_base 9: mod_base = OTHER; note = 2'-O-methyl modified nucleotide
  modified_base 10: mod_base = OTHER; note = 2'-O-methyl modified nucleotide
  modified_base 11: mod_base = OTHER; note = 2'-O-methyl modified nucleotide
  modified_base 12: mod_base = OTHER; note = 2'-O-methyl modified nucleotide
  modified_base 13: mod_base = OTHER; note = 2'-O-methyl modified nucleotide
  modified_base 14: mod_base = OTHER; note = 2'-O-methyl modified nucleotide
  modified_base 15: mod_base = OTHER; note = 2'-O-methyl modified nucleotide
  modified_base 16: mod_base = OTHER; note = 2'-O-methyl modified nucleotide
  modified_base 17: mod_base = OTHER; note = 2'-O-methyl modified nucleotide
  modified_base 18: mod_base = OTHER; note = 2'-O-methyl modified nucleotide
  modified_base 19: mod_base = OTHER; note = 2'-O-methyl modified nucleotide
  modified_base 20: mod_base = OTHER; note = 2'-O-methyl modified nucleotide
  modified_base 21: mod_base = OTHER; note = 2'-O-methyl modified nucleotide
  modified_base 22: mod_base = OTHER; note = 2'-O-methyl modified nucleotide
  modified_base 23: mod_base = OTHER; note = 2'-O-methyl modified nucleotide
  modified_base 24: mod_base = OTHER; note = 2'-O-methyl modified nucleotide
  modified_base 28: mod_base = OTHER; note = 2'-O-methyl modified nucleotide
  modified_base 29: mod_base = OTHER; note = 2'-O-methyl modified nucleotide
  modified_base 30: mod_base = OTHER; note = 2'-O-methyl modified nucleotide
  modified_base 31: mod_base = OTHER; note = 2'-O-methyl modified nucleotide
  modified_base 32: mod_base = OTHER; note = 2'-O-methyl modified nucleotide
  modified_base 33: mod_base = OTHER; note = 2'-O-methyl modified nucleotide
  modified_base 35: mod_base = OTHER; note = 2'-O-methyl modified nucleotide
  modified_base 36: mod_base = OTHER; note = 2'-O-methyl modified nucleotide
  modified_base 38: mod_base = OTHER; note = 2'-O-methyl modified nucleotide
  modified_base 39: mod_base = OTHER; note = 2'-O-methyl modified nucleotide
  modified_base 40: mod_base = OTHER; note = 2'-O-methyl modified nucleotide
  modified_base 41: mod_base = OTHER; note = 2'-O-methyl modified nucleotide with phosphorothioate linkage
  modified_base 42: mod_base = OTHER; note = 2'-O-methyl modified nucleotide

SEQ ID NO: 945 - RNA, 42 nt, synthetic construct; identical to SEQ ID NO: 207
  source 1..42: mol_type = other RNA
  modified_base 1: mod_base = OTHER; note = 2'-O-methyl modified nucleotide with phosphorothioate linkage
  modified_base 2: mod_base = OTHER; note = 2'-O-methyl modified nucleotide
  modified_base 6: mod_base = OTHER; note = 2'-O-methyl modified nucleotide
  modified_base 7: mod_base = OTHER; note = 2'-O-methyl modified nucleotide
  modified_base 8: mod_base = OTHER; note = 2'-O-methyl modified nucleotide
  modified_base 9: mod_base = OTHER; note = 2'-O-methyl modified nucleotide
  modified_base 10: mod_base = OTHER; note = 2'-O-methyl modified nucleotide
  modified_base 11: mod_base = OTHER; note = 2'-O-methyl modified nucleotide
  modified_base 13: mod_base = OTHER; note = 2'-O-methyl modified nucleotide
  modified_base 14: mod_base = OTHER; note = 2'-O-methyl modified nucleotide
  modified_base 15: mod_base = OTHER; note = 2'-O-methyl modified nucleotide
  modified_base 17: mod_base = OTHER; note = 2'-O-methyl modified nucleotide
  modified_base 18: mod_base = OTHER; note = 2'-O-methyl modified nucleotide
  modified_base 19: mod_base = OTHER; note = 2'-O-methyl modified nucleotide
  modified_base 20: mod_base = OTHER; note = 2'-O-methyl modified nucleotide
  modified_base 22: mod_base = OTHER; note = 2'-O-methyl modified nucleotide
  modified_base 23: mod_base = OTHER; note = 2'-O-methyl modified nucleotide
  modified_base 24: mod_base = OTHER; note = 2'-O-methyl modified nucleotide
  modified_base 25: mod_base = OTHER; note = 2'-O-methyl modified nucleotide
  modified_base 26: mod_base = OTHER; note = 2'-O-methyl modified nucleotide
  modified_base 27: mod_base = OTHER; note = 2'-O-methyl modified nucleotide
  modified_base 28: mod_base = OTHER; note = 2'-O-methyl modified nucleotide
  modified_base 29: mod_base = OTHER; note = 2'-O-methyl modified nucleotide
  modified_base 30: mod_base = OTHER; note = 2'-O-methyl modified nucleotide
  modified_base 31: mod_base = OTHER; note = 2'-O-methyl modified nucleotide
  modified_base 32: mod_base = OTHER; note = 2'-O-methyl modified nucleotide
  modified_base 33: mod_base = OTHER; note = 2'-O-methyl modified nucleotide
  modified_base 34: mod_base = OTHER; note = 2'-O-methyl modified nucleotide
  modified_base 35: mod_base = OTHER; note = 2'-O-methyl modified nucleotide
  modified_base 36: mod_base = OTHER; note = 2'-O-methyl modified nucleotide
  modified_base 37: mod_base = OTHER; note = 2'-O-methyl modified nucleotide
  modified_base 38: mod_base = OTHER; note = 2'-O-methyl modified nucleotide
  modified_base 39: mod_base = OTHER; note = 2'-O-methyl modified nucleotide
  modified_base 40: mod_base = OTHER; note = 2'-O-methyl modified nucleotide
  modified_base 41: mod_base = OTHER; note = 2'-O-methyl modified nucleotide with phosphorothioate linkage
  modified_base 42: mod_base = OTHER; note = 2'-O-methyl modified nucleotide

SEQ ID NO: 946 - RNA, 42 nt, synthetic construct; identical to SEQ ID NO: 207
  source 1..42: mol_type = other RNA
  modified_base 1: mod_base = OTHER; note = 2'-O-methyl modified nucleotide with phosphorothioate linkage
  modified_base 2: mod_base = OTHER; note = 2'-O-methyl modified nucleotide
  modified_base 6: mod_base = OTHER; note = 2'-O-methyl modified nucleotide
  modified_base 7: mod_base = OTHER; note = 2'-O-methyl modified nucleotide
  modified_base 8: mod_base = OTHER; note = 2'-O-methyl modified nucleotide
  modified_base 9: mod_base = OTHER; note = 2'-O-methyl modified nucleotide
  modified_base 10: mod_base = OTHER; note = 2'-O-methyl modified nucleotide
  modified_base 11: mod_base = OTHER; note = 2'-O-methyl modified nucleotide
  modified_base 13: mod_base = OTHER; note = 2'-O-methyl modified nucleotide
  modified_base 14: mod_base = OTHER; note = 2'-O-methyl modified nucleotide
  modified_base 15: mod_base = OTHER; note = 2'-O-methyl modified nucleotide
  modified_base 17: mod_base = OTHER; note = 2'-O-methyl modified nucleotide
  modified_base 18: mod_base = OTHER; note = 2'-O-methyl modified nucleotide
  modified_base 19: mod_base = OTHER; note = 2'-O-methyl modified nucleotide
  modified_base 20: mod_base = OTHER; note = 2'-O-methyl modified nucleotide
  modified_base 22: mod_base = OTHER; note = 2'-O-methyl modified nucleotide
  modified_base 23: mod_base = OTHER; note = 2'-O-methyl modified nucleotide
  modified_base 24: mod_base = OTHER; note = 2'-O-methyl modified nucleotide
  modified_base 28: mod_base = OTHER; note = 2'-O-methyl modified nucleotide
  modified_base 29: mod_base = OTHER; note = 2'-O-methyl modified nucleotide
  modified_base 30: mod_base = OTHER; note = 2'-O-methyl modified nucleotide
  modified_base 31: mod_base = OTHER; note = 2'-O-methyl modified nucleotide
  modified_base 32: mod_base = OTHER; note = 2'-O-methyl modified nucleotide
  modified_base 33: mod_base = OTHER; note = 2'-O-methyl modified nucleotide
  modified_base 35: mod_base = OTHER; note = 2'-O-methyl modified nucleotide
  modified_base 36: mod_base = OTHER; note = 2'-O-methyl modified nucleotide
  modified_base 38: mod_base = OTHER; note = 2'-O-methyl modified nucleotide
  modified_base 39: mod_base = OTHER; note = 2'-O-methyl modified nucleotide
  modified_base 40: mod_base = OTHER; note = 2'-O-methyl modified nucleotide
  modified_base 41: mod_base = OTHER; note = 2'-O-methyl modified nucleotide with phosphorothioate linkage
  modified_base 42: mod_base = OTHER; note = 2'-O-methyl modified nucleotide

SEQ ID NO: 947 - RNA, 42 nt, synthetic construct; identical to SEQ ID NO: 207
  source 1..42: mol_type = other RNA
  modified_base 1: mod_base = OTHER; note = 2'-O-methyl modified nucleotide with phosphorothioate linkage
  modified_base 2: mod_base = OTHER; note = 2'-O-methyl modified nucleotide
  modified_base 6: mod_base = OTHER; note = 2'-O-methyl modified nucleotide
  modified_base 7: mod_base = OTHER; note = 2'-O-methyl modified nucleotide
  modified_base 10: mod_base = OTHER; note = 2'-O-methyl modified nucleotide
  modified_base 11: mod_base = OTHER; note = 2'-O-methyl modified nucleotide
  modified_base 13: mod_base = OTHER; note = 2'-O-methyl modified nucleotide
  modified_base 14: mod_base = OTHER; note = 2'-O-methyl modified nucleotide
  modified_base 15: mod_base = OTHER; note = 2'-O-methyl modified nucleotide
  modified_base 17: mod_base = OTHER; note = 2'-O-methyl modified nucleotide
  modified_base 18: mod_base = OTHER; note = 2'-O-methyl modified nucleotide
  modified_base 19: mod_base = OTHER; note = 2'-O-methyl modified nucleotide
  modified_base 20: mod_base = OTHER; note = 2'-O-methyl modified nucleotide
  modified_base 22: mod_base = OTHER; note = 2'-O-methyl modified nucleotide
  modified_base 23: mod_base = OTHER; note = 2'-O-methyl modified nucleotide
  modified_base 24: mod_base = OTHER; note = 2'-O-methyl modified nucleotide
  modified_base 29: mod_base = OTHER; note = 2'-O-methyl modified nucleotide
  modified_base 30: mod_base = OTHER; note = 2'-O-methyl modified nucleotide
  modified_base 31: mod_base = OTHER; note = 2'-O-methyl modified nucleotide
  modified_base 33: mod_base = OTHER; note = 2'-O-methyl modified nucleotide
  modified_base 35: mod_base = OTHER; note = 2'-O-methyl modified nucleotide
  modified_base 36: mod_base = OTHER; note = 2'-O-methyl modified nucleotide
  modified_base 40: mod_base = OTHER; note = 2'-O-methyl modified nucleotide
  modified_base 41: mod_base = OTHER; note = 2'-O-methyl modified nucleotide with phosphorothioate linkage
  modified_base 42: mod_base = OTHER; note = 2'-O-methyl modified nucleotide

SEQ ID NO: 948 - RNA, 42 nt, synthetic construct; identical to SEQ ID NO: 207
  source 1..42: mol_type = other RNA
  modified_base 1: mod_base = OTHER; note = 2'-O-methyl modified nucleotide with phosphorothioate linkage
  modified_base 2: mod_base = OTHER; note = 2'-O-methyl modified nucleotide
  modified_base 6: mod_base = OTHER; note = 2'-O-methyl modified nucleotide
  modified_base 7: mod_base = OTHER; note = 2'-O-methyl modified nucleotide
  modified_base 10: mod_base = OTHER; note = 2'-O-methyl modified nucleotide
  modified_base 11: mod_base = OTHER; note = 2'-O-methyl modified nucleotide
  modified_base 13: mod_base = OTHER; note = 2'-O-methyl modified nucleotide
  modified_base 14: mod_base = OTHER; note = 2'-O-methyl modified nucleotide
  modified_base 15: mod_base = OTHER; note = 2'-O-methyl modified nucleotide
  modified_base 17: mod_base = OTHER; note = 2'-O-methyl modified nucleotide
  modified_base 18: mod_base = OTHER; note = 2'-O-methyl modified nucleotide
  modified_base 19: mod_base = OTHER; note = 2'-O-methyl modified nucleotide
  modified_base 20: mod_base = OTHER; note = 2'-O-methyl modified nucleotide
  modified_base 22: mod_base = OTHER; note = 2'-O-methyl modified nucleotide
  modified_base 29: mod_base = OTHER; note = 2'-O-methyl modified nucleotide
  modified_base 30: mod_base = OTHER; note = 2'-O-methyl modified nucleotide
  modified_base 31: mod_base = OTHER; note = 2'-O-methyl modified nucleotide
  modified_base 33: mod_base = OTHER; note = 2'-O-methyl modified nucleotide
  modified_base 40: mod_base = OTHER; note = 2'-O-methyl modified nucleotide
  modified_base 41: mod_base = OTHER; note = 2'-O-methyl modified nucleotide with phosphorothioate linkage
  modified_base 42: mod_base = OTHER; note = 2'-O-methyl modified nucleotide

SEQ ID NO: 949 - RNA, 44 nt, synthetic construct; identical to SEQ ID NO: 51
  source 1..44: mol_type = other RNA
  modified_base 1: mod_base = OTHER; note = 2'-O-methyl modified nucleotide with phosphorothioate linkage
  modified_base 2: mod_base = OTHER; note = 2'-O-methyl modified nucleotide
  modified_base 8: mod_base = OTHER; note = 2'-O-methyl modified nucleotide
  modified_base 9: mod_base = OTHER; note = 2'-O-methyl modified nucleotide
  modified_base 13: mod_base = OTHER; note = 2'-O-methyl modified nucleotide
  modified_base 15: mod_base = OTHER; note = 2'-O-methyl modified nucleotide
  modified_base 16: mod_base = OTHER; note = 2'-O-methyl modified nucleotide
  modified_base 17: mod_base = OTHER; note = 2'-O-methyl modified nucleotide
  modified_base 20: mod_base = OTHER; note = 2'-O-methyl modified nucleotide
  modified_base 21: mod_base = OTHER; note = 2'-O-methyl modified nucleotide
  modified_base 22: mod_base = OTHER; note = 2'-O-methyl modified nucleotide
  modified_base 24: mod_base = OTHER; note = 2'-O-methyl modified nucleotide
  modified_base 31: mod_base = OTHER; note = 2'-O-methyl modified nucleotide
  modified_base 32: mod_base = OTHER; note = 2'-O-methyl modified nucleotide
  modified_base 33: mod_base = OTHER; note = 2'-O-methyl modified nucleotide
  modified_base 35: mod_base = OTHER; note = 2'-O-methyl modified nucleotide
  modified_base 42: mod_base = OTHER; note = 2'-O-methyl modified nucleotide
  modified_base 43: mod_base = OTHER; note = 2'-O-methyl modified nucleotide with phosphorothioate linkage
  modified_base 44: mod_base = OTHER; note = 2'-O-methyl modified nucleotide

SEQ ID NO: 950 - RNA, 40 nt, synthetic construct; identical to SEQ ID NO: 927
  source 1..40: mol_type = other RNA
  misc_difference 1: note = Nucleotide may be 2'-O-methyl modified
  misc_difference 2: note = Nucleotide may be 2'-O-methyl modified
  misc_difference 14: note = Nucleotide may be 2'-O-methyl modified
  misc_difference 21: note = Nucleotide may be 2'-O-methyl modified
  misc_difference 23: note = Nucleotide may be 2'-O-methyl modified
  misc_difference 25: note = Nucleotide may be 2'-O-methyl modified
  misc_difference 28: note = Nucleotide may be 2'-O-methyl modified
  misc_difference 29: note = Nucleotide may be 2'-O-methyl modified
  misc_difference 30: note = Nucleotide may be 2'-O-methyl modified
  misc_difference 31: note = Nucleotide may be 2'-O-methyl modified
  misc_difference 33: note = Nucleotide may be 2'-O-methyl modified
  misc_difference 34: note = Nucleotide may be 2'-O-methyl modified
  misc_difference 36: note = Nucleotide may be 2'-O-methyl modified
  misc_difference 37: note = Nucleotide may be 2'-O-methyl modified
  misc_difference 38: note = Nucleotide may be 2'-O-methyl modified
  misc_difference 39: note = Nucleotide may be 2'-O-methyl modified
  misc_difference 40: note = Nucleotide may be 2'-O-methyl modified

SEQ ID NO: 951 - RNA, 40 nt, synthetic construct; identical to SEQ ID NO: 928
  source 1..40: mol_type = other RNA
  misc_difference 1: note = Nucleotide may be 2'-O-methyl modified
  misc_difference 2: note = Nucleotide may be 2'-O-methyl modified
  misc_difference 14: note = Nucleotide may be 2'-O-methyl modified
  misc_difference 21: note = Nucleotide may be 2'-O-methyl modified
  misc_difference 23: note = Nucleotide may be 2'-O-methyl modified
  misc_difference 25: note = Nucleotide may be 2'-O-methyl modified
  misc_difference 28: note = Nucleotide may be 2'-O-methyl modified
  misc_difference 29: note = Nucleotide may be 2'-O-methyl modified
  misc_difference 30: note = Nucleotide may be 2'-O-methyl modified
  misc_difference 31: note = Nucleotide may be 2'-O-methyl modified
  misc_difference 33: note = Nucleotide may be 2'-O-methyl modified
  misc_difference 34: note = Nucleotide may be 2'-O-methyl modified
  misc_difference 36: note = Nucleotide may be 2'-O-methyl modified
  misc_difference 37: note = Nucleotide may be 2'-O-methyl modified
  misc_difference 38: note = Nucleotide may be 2'-O-methyl modified
  misc_difference 39: note = Nucleotide may be 2'-O-methyl modified
  misc_difference 40: note = Nucleotide may be 2'-O-methyl modified

SEQ ID NO: 952 - RNA, 40 nt, synthetic construct; identical to SEQ ID NO: 927
  source 1..40: mol_type = other RNA
  misc_difference 1: note = Nucleotide may be 2'-O-methyl modified
  misc_difference 2: note = Nucleotide may be 2'-O-methyl modified
  misc_difference 4: note = Nucleotide may be 2'-O-methyl modified
  misc_difference 10: note = Nucleotide may be 2'-O-methyl modified
  misc_difference 14: note = Nucleotide may be 2'-O-methyl modified
  misc_difference 15: note = Nucleotide may be 2'-O-methyl modified
  misc_difference 16: note = Nucleotide may be 2'-O-methyl modified
  misc_difference 18: note = Nucleotide may be 2'-O-methyl modified
  misc_difference 21: note = Nucleotide may be 2'-O-methyl modified
  misc_difference 23: note = Nucleotide may be 2'-O-methyl modified
  misc_difference 25: note = Nucleotide may be 2'-O-methyl modified
  misc_difference 27: note = Nucleotide may be 2'-O-methyl modified
  misc_difference 28: note = Nucleotide may be 2'-O-methyl modified
  misc_difference 29: note = Nucleotide may be 2'-O-methyl modified
  misc_difference 30: note = Nucleotide may be 2'-O-methyl modified
  misc_difference 31: note = Nucleotide may be 2'-O-methyl modified
  misc_difference 33: note = Nucleotide may be 2'-O-methyl modified
  misc_difference 34: note = Nucleotide may be 2'-O-methyl modified
  misc_difference 36: note = Nucleotide may be 2'-O-methyl modified
  misc_difference 37: note = Nucleotide may be 2'-O-methyl modified
  misc_difference 38: note = Nucleotide may be 2'-O-methyl modified
  misc_difference 39: note = Nucleotide may be 2'-O-methyl modified
  misc_difference 40: note = Nucleotide may be 2'-O-methyl modified

SEQ ID NO: 953 - RNA, 40 nt, synthetic construct; identical to SEQ ID NO: 928
  source 1..40: mol_type = other RNA
  misc_difference 1: note = Nucleotide may be 2'-O-methyl modified
  misc_difference 2: note = Nucleotide may be 2'-O-methyl modified
  misc_difference 4: note = Nucleotide may be 2'-O-methyl modified
  misc_difference 10: note = Nucleotide may be 2'-O-methyl modified
  misc_difference 14: note = Nucleotide may be 2'-O-methyl modified
  misc_difference 15: note = Nucleotide may be 2'-O-methyl modified
  misc_difference 16: note = Nucleotide may be 2'-O-methyl modified
  misc_difference 18: note = Nucleotide may be 2'-O-methyl modified
  misc_difference 21: note = Nucleotide may be 2'-O-methyl modified
  misc_difference 23: note = Nucleotide may be 2'-O-methyl modified
  misc_difference 25: note = Nucleotide may be 2'-O-methyl modified
  misc_difference 27: note = Nucleotide may be 2'-O-methyl modified
  misc_difference 28: note = Nucleotide may be 2'-O-methyl modified
  misc_difference 29: note = Nucleotide may be 2'-O-methyl modified
  misc_difference 30: note = Nucleotide may be 2'-O-methyl modified
  misc_difference 31: note = Nucleotide may be 2'-O-methyl modified
  misc_difference 33: note = Nucleotide may be 2'-O-methyl modified
  misc_difference 34: note = Nucleotide may be 2'-O-methyl modified
  misc_difference 36: note = Nucleotide may be 2'-O-methyl modified
  misc_difference 37: note = Nucleotide may be 2'-O-methyl modified
  misc_difference 38: note = Nucleotide may be 2'-O-methyl modified
  misc_difference 39: note = Nucleotide may be 2'-O-methyl modified
  misc_difference 40: note = Nucleotide may be 2'-O-methyl modified

SEQ ID NO: 954 - RNA, 19 nt, synthetic construct
  source 1..19: mol_type = other RNA
aatttctactgttgtagat

SEQ ID NO: 955 - protein, 7 aa, synthetic construct
  SITE 1: note = Residue attached to adenosine
PKKKRKV

SEQ ID NO: 956 - protein, 7 aa, synthetic construct
  SITE 1: note = Residue attached to adenosine
PKKKRKV

SEQ ID NO: 957 - protein, 7 aa, synthetic construct
QSGTRNH